(19) United States
(12) Patent Application Publication
(10) Pub. No.: US 2006/0165716 A1
(43) Pub. Date: Jul. 27, 2006

(54) Immunogenic compositions for gram positive bacteria such as streptococcus agalactiae

(76) Inventors: John L. Telford, Siena (IT); Guido Grandi, Siena (IT); Peter Lauer, Barkeley, CA (US); Marirosa Mora, Siena (IT); Immaculada Margarit Y Ros, Siena (IT); Domenico Maione, Siena (IT); Guiliano Bensi, Siena (IT); Daniela Rinaudo, Siena (IT); Vega Masignani, Siena (IT); Michelle Barocchi, Siena (IT); Rino Rappuoli, Siena (IT)

Correspondence Address: BANNER & WITCOFF, 1001 G STREET N W, SUITE 1100, WASHINGTON, DC, 20001, US

(21) Appl. No.: 11/192,046

(22) Filed: Jul. 29, 2005

Related U.S. Application Data
(60) Provisional application No. 60/697,643, filed on Jul. 11, 2005.
(60) Provisional application No. 60/695,453, filed on Jul. 1, 2005.
(60) Provisional application No. 60/693,001, filed on Jun. 21, 2005.
(60) Provisional application No. 60/673,754, filed on Apr. 22, 2005.
(60) Provisional application No. 60/660,321, filed on Mar. 11, 2005.
(60) Provisional application No. 60/640,069, filed on Dec. 30, 2004.
(60) Provisional application No. 60/633,418, filed on Dec. 7, 2004.
(60) Provisional application No. 60/616,833, filed on Oct. 8, 2004.
(60) Provisional application No. 60/609,833, filed on Sep. 13, 2004.
(60) Provisional application No. 60/592,805, filed on Jul. 29, 2004.

(51) Int. Cl. A61K 39/02

(52) U.S. Cl. 424/190.1

(57) ABSTRACT

The invention relates to the identification of a new adhesin islands within the genomes of several Group A and Group B Streptococcus serotypes and isolates. The adhesin islands are thought to encode surface proteins which are important in the bacteria's virulence. Thus, the adhesin island proteins of the invention may be used in immunogenic compositions for prophylactic or therapeutic immunization against GAS or GBS infection. For example, the invention may include an immunogenic composition comprising one or more of the discovered adhesin island proteins.

### FIELD OF THE INVENTION

[0001] The invention relates to the identification of adhesin islands within the genome Streptococcus agalactiae (“GBS”) and the use of adhesin island amino acid sequences encoded by these adhesin islands in compositions for the treatment or prevention of GBS infection. Similar sequences have been identified in other Gram positive bacteria. The invention further includes immunogenic compositions comprising adhesin island amino acid sequences of Gram positive bacteria for the treatment or prevention of infection of Gram positive bacteria. Preferred immunogenic compositions of the invention include an adhesin island surface protein which may be formulated or purified in an oligomeric or pilus form.

### BACKGROUND OF THE INVENTION

[0002] GBS has emerged in the last 20 years as the major cause of neonatal sepsis and meningitis that affects 0.5-3 per 1000 live births, and an important cause of morbidity among older age groups affecting 5-8 per 100,000 of the population. Current disease management strategies rely on intrapartum antibiotics and neonatal monitoring which have reduced neonatal case mortality from >50% in the 1970's to less than 10% in the 1990's. Nevertheless, there is still considerable morbidity and mortality and the management is expensive. 15-35% of pregnant women are asymptomatic carriers and at high risk of transmitting the disease to their babies. Risk of neonatal infection is associated with low serotype specific maternal antibodies and high titers are believed to be protective. In addition, invasive GBS disease is increasingly recognized in elderly adults with underlying disease such as diabetes and cancer.

[0003] The “B” in “GBS” refers to the Lancefield classification, which is based on the antigenicity of a carbohydrate which is soluble in dilute acid and called the C carbohydrate. Lancefield identified 13 types of C carbohydrate, designated A to 0, that could be serologically differentiated. The organisms that most commonly infect humans are found in groups A, B, D, and G. Within group B, strains can be divided into at least 9 serotypes (Ia, Ib, Ia/c, II, III, IV, V, VI, VII and VIII) based on the structure of their polysaccharide capsule. In the past, serotypes Ia, Ib, II, and III were equally prevalent in normal vaginal carriage and early onset sepsis in newborns. Type V GBS has emerged as an important cause of GBS infection in the USA, however, and strains of types VI and VIII have become prevalent among Japanese women.

[0004] The genome sequence of a serotype V strain 2603 V/R has been published (See Tettelin et al. (2002) Proc. Natl. Acad. Sci. USA, 10.1073/pnas.182380799) and various polypeptides for use a vaccine antigens have been identified (WO 02/34771). The vaccines currently in clinical trials, however, are based primarily on polysaccharide antigens. These suffer from serotype-specificity and poor immunogenicity, and so there is a need for effective vaccines against S. agalactiae infection.

[0005] S. agalactiae is classified as a gram positive bacterium, a collection of about 21 genera of bacteria that colonize humans, have a generally spherical shape, a positive Gram stain reaction and lack endospores. Gram positive bacteria are frequent human pathogens and include Staphylococcus (such as S. aureus), Streptococcus (such as S. pyogenes (GBS), S. pyogenes (GAS), S. pneumonaie, S. mutans), Enterococcus (such as E. faecalis and E. faecium), Clostridium (such as C. difficile), Listeria (such as L. monocytogenes) and Corynebacterium (such as C. diphtheria).

[0006] It is an object of the invention to provide further and improved compositions for providing immunity against disease and/or infection of Gram positive bacteria. The compositions are based on the identification of adhesin islands within Streptococcal genomes and the use of amino acid sequences encoded by these islands in therapeutic or prophylactic compositions. The invention further includes compositions comprising immunogenic adhesin island proteins within other Gram positive bacteria in therapeutic or prophylactic compositions.

### SUMMARY OF THE INVENTION

[0007] Applicants have identified a new adhesin island, “GBS Adhesin Island 1”, “AI-1” or “GBS AI-1”, within the genomes of several Group B Streptococcus serotypes and isolates. This adhesin island is thought to encode surface proteins which are important in the bacteria's virulence. In addition, Applicants have discovered that surface proteins within GBS Adhesin Islands form a previously unseen pilus structure on the surface of GBS bacteria. Amino acid sequences encoded by such GBS Adhesin Islands may be used in immunogenic compositions for the treatment or prevention of GBS infection.

[0008] A preferred immunogenic composition of the invention comprises an AI-1 surface protein, such as GBS 80, which may be formulated or purified in an oligomeric (pilus) form. In a preferred embodiment, the oligomeric form is a hyperoligomer. Electron micrographs depicting some of the first visualizations of this pilus structure in a wild type GBS strain are shown in FIGS. 16, 17, 49, and 50. In addition, Applicants have transformed a GBS strain with a plasmid comprising the AI surface protein GBS 80 which resulted in increased production of that AI surface protein. The electron micrographs of this mutant GBS strain in FIGS. 13-15 reveal long, hyper-oligomeric structures comprising GBS 80 which appear to cover portions of the surface of the bacteria and stretch far out into the supernatant. These hyper-oligomeric pilus structures comprising a GBS AI surface protein may be purified or otherwise formulated for use in immunogenic compositions.

[0009] GBS AI-1 comprises a series of approximately five open reading frames encoding for a collection of amino acid sequences comprising surface proteins and sortases (“AI-1 proteins”). Specifically, AI-1 includes polynucleotide sequences encoding for two or more of GBS 80, GBS 104, GBS 52, SAG0647 and SAG0648. One or more of the AI-1 polynucleotide sequences may be replaced by a polynucleotide sequence coding for a fragment of the replaced ORF. Alternatively, one or more of the AI-1 open reading frames may be replaced by a sequence having sequence homology (sequence identity) to the replaced ORF.

[0010] AI-1 typically resides on an approximately 16.1 kb transposon-like element frequently inserted into the open reading frame for trmA. One or more of the AI-1 surface protein sequences typically include an LPXTG motif (such as LPXTG (SEQ ID NO: 122)) or other sortase substrate motif. The AI surface proteins of the invention may affect the ability of the GBS bacteria to adhere to and invade epithelial cells. AI surface proteins may also affect the ability of GBS to translocate through an epithelial cell layer. Preferably, one or more AI surface proteins are capable of binding to or otherwise associating with an epithelial cell surface. AI surface proteins may also be able to bind to or associate with fibrinogen, fibronectin, or collagen.

[0011] The sortase proteins are thought to be involved in the secretion and anchoring of the LPXTG containing surface proteins. AI-1 may encode at least one surface protein. Alternatively, AI-1 may encode at least two surface proteins and at least one sortase. Preferably, AI-1 encodes for at least three surface proteins and at least two sortases. One or more of the surface proteins may include an LPXTG motif or other sortase substrate motif.

[0012] The GBS AI-1 protein of the composition may be selected from the group consisting of GBS 80, GBS 104, GBS 52, SAG0647 and SAG0648. GBS AI-1 surface proteins GBS 80 and GBS 104 are preferred for use in the immunogenic compositions of the invention.

[0013] In addition to the open reading frames encoding the AI-1 proteins, AI-1 may also include a divergently transcribed transcriptional regulator such as araC (i.e., the transcriptional regulator is located near or adjacent to the AI protein open reading frames, but it transcribed in the opposite direction). It is believed that araC may regulate the expression of the GBS AI operon. (See Korbel et al., Nature Biotechnology (2004) 22(7): 911-917 for a discussion of divergently transcribed regulators in E. coli).

[0014] A second adhesin island, “Adhesin Island-2”, “AI-2” or “GBS AI-2”, has also been identified in numerous GBS serotypes. Amino acid sequences encoded by the open reading frames of AI-2 may also be used in immunogenic compositions for the treatment or prevention of GBS infection.

[0015] GBS AI-2 comprises a series of approximately five open reading frames encoding for a collection of amino acid sequences comprising surface proteins and sortases. Specifically, AI-2 includes open reading frames encoding for two or more of GBS 67, GBS 59, GBS 150, SAG1405, SAG1406, 01520, 01521, 01522, 01523, 01523, 01524 and 01525. The GBS AI-2 sequences may be divided into two subgroups. In one embodiment, AI-2 includes open reading frames encoding for two or more of GBS 67, GBS 59, GBS 150, SAG1405, and SAG1406. This collection of open reading frames may be generally referred to as GBS AI-2 subgroup 1. Alternatively, AI-2 may include open reading frames encoding for two or more of 01520, 01521, 01522, 01523, 01523, 01524 and 01525. This collection of open reading frames may be generally referred to as GBS AI-2 subgroup 2.

[0016] One or more of the AI-2 open reading frame polynucleotide sequences may be replaced by a polynucleotide sequence coding for a fragment of the replaced ORF. Alternatively, one or more of the AI-2 open reading frames may be replaced by a sequence having sequence homology (sequence identity) to the replaced ORF.

[0017] One or more of the AI-2 surface proteins typically include an LPXTG motif (such as LPXTG (SEQ ID NO: 122)) or other sortase substrate motif. These sortase proteins are thought to be involved in the secretion and anchoring of the LPXTG containing surface proteins. AI-2 may encode for at least one surface protein. Alternatively, AI-2 may encode for at least two surface proteins and at least one sortase. Preferably, AI-2 encodes for at least three surface proteins and at least two sortases. One or more of the surface proteins may include an LPXTG motif.

[0018] The AI-2 protein of the composition may be selected from the group consisting of GBS 67, GBS 59, GBS 150, SAG1405, SAG1406, 01520, 01521, 01522, 01523, 01523, 01524 and 01525. AI-2 surface proteins GBS 67, GBS 59, and 01524 are preferred AI-2 proteins for use in the immunogenic compositions of the invention. GBS 67 or GBS 59 is particularly preferred.

[0019] GBS AI-2 may also include a divergently transcribed transcriptional regulator such as a RofA like protein (for example rogB). As in AI-1, rogB is thought to regulate the expression of the AI-2 operon.

[0020] The GBS AI proteins of the invention may be used in immunogenic compositions for prophylactic or therapeutic immunization against GBS infection. For example, the invention may include an immunogenic composition comprising one or more GBS AI-1 proteins and one or more GBS AI-2 proteins.

[0021] The immunogenic compositions may also be selected to provide protection against an increased range of GBS serotypes and strain isolates. For example, the immunogenic composition may comprise a first and second GBS AI protein, wherein a full length polynucleotide sequence encoding for the first GBS AI protein is not present in a genome comprising a full length polynucleotide sequence encoding for the second GBS AI protein. In addition, each antigen selected for use in the immunogenic compositions will preferably be present in the genomes of multiple GBS serotypes and strain isolates. Preferably, each antigen is presnt in the genomes of at least two (i.e., 3, 4, 5, 6, 7, 8, 9, 10, or more) GBS strain isolates. More preferably, each antigen is present in the genomes of at least two (i.e., at least 3, 4, 5 or more) GBS serotypes.

[0022] Within GBS AI-1, Applicants have found that Group B Streptococcus surface exposure of GBS 104 is dependent on the concurrent expression of GBS 80. It is thought that GBS 80 is involved in the transport or localization of GBS 104 to the surface of the bacteria. The two proteins may be oligomerized or otherwise chemically or physically associated. It is possible that this association involves a conformational change in GBS 104 that facilitates its transition to the surface of the GBS bacteria. In addition, one or more AI sortases may also be involved in this surface localization and chemical or physical association. Similar relationships are thought to exist within GBS AI-2. The compositions of the invention may therefore include at least two AI proteins, wherein the two AI proteins are physically or chemically associated. Preferably, the two AI proteins form an oligomer. Preferably, one or more of the AI proteins are in a hyper-oligomeric form. In one embodiment, the associated AI proteins may be purified or isolated from a GBS bacteria or recombinant host cell.

[0023] It is also an object of the invention to provide further and improved compositions for providing prophylactic or therapeutic protection against disease and/or infection of Gram positive bacteria. The compositions are based on the identification of adhesin islands within Streptococcal genomes and the use of amino acid sequences encoded by these islands in therapeutic or prophylactic compositions. The invention further includes compositions comprising immunogenic adhesin island proteins within other Gram positive bacteria in therapeutic or prophylactic compositions. Preferred Gram positive adhesin island proteins for use in the invention may be derived from Staphylococcus (such as S. aureus), Streptococcus (such as S. agalactiae (GBS), S. pyogenes (GAS), S. pneumonaie, S. mutans), Enterococcus (such as E. faecalis and E. faecium), Clostridium (such as C. difficile), Listeria (such as L. monocytogenes) and Corynebacterium (such as C. diphtheria). Preferably, the Gram positive adhesin island surface proteins are in oligomeric or hyperologimeric form.

[0024] For example, Applicants have identified adhesin islands within the genomes of several Group A Streptococcus serotypes and isolates. These adhesion islands are thought to encode surface proteins which are important in the bacteria's virulence, and Applicants have obtained the first electron micrographs revealing the presence of these adhesin island proteins in hyperoligomeric pilus structures on the surface of Group A Streptococcus.

[0025] Group A Streptococcus is a human specific pathogen which causes a wide variety of diseases ranging from pharyngitis and impetigo through life threatening invasive disease and necrotizing fasciitis. In addition, post-streptococcal autoimmune responses are still a major cause of cardiac pathology in children.

[0026] Group A Streptococcal infection of its human host can generally occur in three phases. The first phase involves attachment and/or invasion of the bacteria into host tissue and multiplication of the bacteria within the extracellular spaces. Generally this attachment phase begins in the throat or the skin. The deeper the tissue level infected, the more severe the damage that can be caused. In the second stage of infection, the bacteria secretes a soluble toxin that diffuses into the surrounding tissue or even systemically through the vasculature. This toxin binds to susceptible host cell receptors and triggers innappropropriate immune responses by these host cells, resulting in pathology. Because the toxin can diffuse throughout the host, the necrosis directly caused by the GAS toxins may be physically located in sites distant from the bacterial infection. The final phase of GAS infection can occur long after the original bacteria have been cleared from the host system. At this stage, the host's previous immune response to the GAS bacteria due to cross reactivity between epitopes of a GAS surface protein, M, and host tissues, such as the heart. A general review of GAS infection can be found in Principles of Bacterial Pathogeneis, Groisman ed., Chapter 15 (2001).

[0027] In order to prevent the pathogenic effects associated with the later stages of GAS infection, an effective vaccine against GAS will preferably facilitate host elimination of the bacteria during the initial attachment and invasion stage.

[0028] Isolates of Group A Streptococcus are historically classified according to the M surface protein described above. The M protein is surface exposed trypsin-sensitive protein generally comprising two polypeptide chains complexed in an alpha helical formation. The carboxyl terminus is anchored in the cytoplasmic membrane and is highly conserved among all group A streptococci. The amino terminus, which extend through the cell wall to the cell surface, is responsible for the antigenic variability observed among the 80 or more serotypes of M proteins.

[0029] A second layer of classification is based on a variable, trypsin-resistant surface antigen, commonly referred to as the T-antigen. Decades of epidemiology based on M and T serological typing have been central to studies on the biological diversity and disease causing potential of Group A Streptococci. While the M-protein component and its inherent variability have been extensively characterized, even after five decades of study, there is still very little known about the structure and variability of T-antigens. Antisera to define T types is commercially available from several sources, including Sevapharma (http://www.sevapharma.cz/en).

[0030] The gene coding for one form of T-antigen, T-type 6, from an M6 strain of GAS (D741) has been cloned and characterized and maps to an approximately 11 kb highly variable pathogenicity island. Schneewind et al., J. Bacteriol. (1990) 172(6):3310-3317. This island is known as the Fibronectin-binding, Collagen-binding T-antigen (FCT) region because it contains, in addition to the T6 coding gene (tee6), members of a family of genes coding for Extra Cellular Matrix (ECM) binding proteins. Bessen et al., Infection & Immunity (2002) 70(3):1159-1167. Several of the protein products of this gene family have been shown to directly bind either fibronectin and/or collagen. See Hanski et al., Infection & Immunity (1992) 60(12):5119-5125; Talay et al., Infection & Immunity (1992(60(9):3837-3844; Jaffe et al. (1996) 21(2):373-384; Rocha et al., Adv Exp Med Biol. (1997) 418:737-739; Kreikemeyer et al., J Biol Chem (2004) 279(16):15850-15859; Podbielski et al., Mol. Microbiol. (1999) 31(4):1051-64; and Kreikemeyer et al., Int. J. Med Microbiol (2004) 294(2-3):177-88. In some cases direct evidence for a role of these proteins in adhesion and invasion has been obtained.

[0031] Applicants raised antiserum against a recombinant product of the tee6 gene and used it to explore the expression of T6 in M6 strain 2724. In immunoblot of mutanolysin extracts of this strain, the antiserum recognized, in addition to a band corresponding to the predicted molecular mass of the product, very high molecular weight ladders ranging in mobility from about 100 kDa to beyond the resolution of the 3-8% gradient gels used.

[0032] This pattern of high molecular weight products is similar to that observed in immunoblots of the protein components of the pili identified in Streptococcus agalactiae (described above) and previously in Corynebacterium diphtheriae. Electron microscropy of strain M6_{—}2724 with antisera specific for the product of tee6 revealed abundant surface staining and long pilus like structures extending up to 700 nanometers from the bacterial surface, revealing that the T6 protein, one of the antigens recognized in the original Lancefiled serotyping system, is located within a GAS Adhesin Island (GAS AI-1) and forms long covalently linked pilus structures.

[0033] Applicants have identified at least four different Group A Streptococcus Adhesin Islands. While these GAS AI sequences can be identified in numerous M types, Applicants have surprisingly discovered a correlation between the four main pilus subunits from the four different GAS AI types and specific T classifications. While other trypsin-resistant surface exposed proteins are likely also implicated in the T classification designations, the discovery of the role of the GAS adhesin islands (and the associated hyper-oligomeric pilus like structures) in T classification and GAS serotype variance has important implications for prevention and treatment of GAS infections. Applicants have identified protein components within each of the GAS adhesin islands which are associated with the pilus formation. These proteins are believed to be involved in the bacteria's initial adherence mechanisms. Immunological recognition of these proteins may allow the host immune response to slow or prevent the bacteria's transition into the more pathogenic later stages of infection.

[0034] In addition, Applicants have discovered that the GBS pili structures appear to be implicated in the formation of biofilms (populations of bacteria growing on a surface, often enclosed in an exopolysaccharide matrix). Biofilms are generally associated with bacterial resistance, as antibiotic treatments and host immune response are frequently unable to erradicate all of the bacteria components of the biofilm. Direction of a host immune response against surface proteins exposed during the first steps of bacterial attachment (i.e., before complete biofilm formation) is preferable.

[0035] The invention therefore provides for improved immunogenic compositions against GAS infection which may target GAS bacteria during their initial attachment efforts to the host epithelial cells and may provide protection against a wide range of GAS serotypes. The immunogenic compositions of the invention include GAS AI surface proteins which may be formulated in an oligomeric, or hyperoligomeric (pilus) form. The immunogenic compositions of the invention may include one or more GAS AI surface proteins. The invention also includes combinations of GAS AI surface proteins. Combinations of GAS AI surface proteins may be selected from the same adhesin island or they may be selected from different GAS adhesin islands.

[0036] Amino acid sequence encoded by such GAS Adhesin Islands may be used in immunogenic compositions for the treatment or prevention of GAS infection. Preferred immunogenic compositions of the invention comprise a GAS AI surface protein which has been formulated or purified in an oligomeric (pilus) form. In a preferred embodiment, the oligomeric form is a hyperoligomer.

[0037] GAS Adhesin Islands generally include a series of open reading frames within a GAS genome that encode for a collection of surface proteins and sortases. A GAS Adhesin Island may encode for an amino acid sequence comprising at least one surface protein. The Adhesin Island, therefore, may encode at least one surface protein. Alternatively, a GAS Adhesin Island may encode for at least two surface proteins and at least one sortase. Preferably, a GAS Adhesin Island encodes for at least three surface proteins and at least two sortases. One or more of the surface proteins may include an LPXTG motif (such as LPXTG (SEQ ID NO: 122)) or other sortase substrate motif. One or more GAS AI surface proteins may participate in the formation of a pilus structure on the surface of the Gram positive bacteria.

[0038] GAS Adhesin Islands of the invention preferably include a divergently transcribed transcriptional regulator. The transcriptional regulator may regulate the expression of the GAS AI operon. Examples of transcriptional regulators found in GAS AI sequences include RofA and Nra.

[0039] The GAS AI surface proteins may bind or otherwise adhere to fibrinogen, fibronectin, or collagen. One or more of the GAS AI surface proteins may comprise a fimbrial structural subunit.

[0040] One or more of the GAS AI surface proteins may include an LPXTG motif or other sortase substrate motif. The LPXTG motif may be followed by a hydrophobic region and a charged C terminus, which are thought to retard the protein in the cell membrane to facilitate recognition by the membrane-localized sortase. See Barnett, et al., J. Bacteriology (2004) 186 (17): 5865-5875.

[0041] GAS AI sequences may be generally categorized as Type 1, Type 2, Type 3, or Type 4, depending on the number and type of sortase sequences within the island and the percentage identity of other proteins (with the exception of RofA and cpa) within the island. Schematics of the GAS adhesin islands are set forth in FIG. 51A and FIG. 162. “GAS Adhesin Island-1 or “GAS AI-1” comprises a series of approximately five open reading frames encoding for a collection of amino acid sequences comprising surface proteins and sortases (“GAS AI-1 proteins”). GAS AI-1 preferably comprises surface proteins, a srtB sortase and a rofA divergently transcribed transcriptional regulator. GAS AI-1 surface proteins may include a fibronectin binding protein, a collagen adhesion protein and a fimbrial structural subunit. The fimbrial structural subunit (also known as tee6) is thought to form the shaft portion of the pilus like structure, while the collagen adhesion protein (Cpa) is thought to act as an accessory protein facilitating the formation of the pilus structure, exposed on the surface of the bacterial capsule.

[0042] Specifically, GAS AI-1 includes polynucleotide sequences encoding for two or more of M6_Spy0157, M6_Spy0158, M6_Spy0159, M6_Spy0160, M6_Spy0161. The GAS AI-1 may also include polynucleotide sequences encoding for any one of CDC SS 410_fimbrial, ISS3650_fimbrial, DSM2071_fimbrial

[0043] A preferred immunogenic composition of the invention comprises a GAS AI-1 surface protein which may be formulated or purified in an oligomeric (pilus) form. In a preferred embodiment, the oligomeric form is a hyperoligomer. The immunogenic composition of the invention may alternatively comprise an isolated GAS AI-1 surface protein in oligomeric (pilus) form. The oligomer or hyperoligomeric pilus structures comprising GAS AI-1 surface proteins may be purified or otherwise formulated for use in immunogenic compositions.

[0044] One or more of the GAS AI-1 polynucleotide sequences may be replaced by a polynucleotide sequence coding for a fragment of the replaced ORF. Alternatively, one or more of the GAS AI-1 open reading frames may be replaced by a sequence having sequence homology (sequence identity) to the replaced ORF.

[0045] One or more of the GAS AI-1 surface proteins typically include an LPXTG motif (such as LPXTG (SEQ ID NO: 122)) or other sortase substrate motif. These sortase proteins are thought to be involved in the secretion and anchoring of the LPXTG containing surface proteins. GAS AI-1 may encode for at least one surface protein. Alternatively, GAS AI-1 may encode for at least two surface proteins and at least one sortase. Preferably, GAS AI-1 encodes for at least three surface proteins and at least two sortases. One or more of the surface proteins may include an LPXTG motif.

[0046] GAS AI-1 preferably includes a srtB sortase. GAS srtB sortases may preferably anchor surface proteins with an LPSTG motif (SEQ ID NO: 166), particularly where the motif is followed by a serine.

[0047] The GAS AI-1 protein of the composition may be selected from the group consisting of M6_Spy0157, M6_Spy0158, M6_Spy0159, M6_Spy0160 M6_Spy0161, CDC SS 410_fimbrial, ISS3650_fimbrial, and DSM2071_fimbrial. GAS AI-1 surface proteins M6_Spy0157 (a fibronectin binding protein), M6_Spy0159 (a collagen adhesion protein, Cpa), M6_Spy0160 (a fimbrial structural subunit, tee6), CDC SS 410_fimbrial (a fimbrial structural subunit), ISS3650_fimbrial (a fimbrial structural subunit), and DSM2071_fimbrial (a fimbrial structural subunit) are preferred GAS AI-1 proteins for use in the immunogenic compositions of the invention. The fimbrial structural subunit tee6 and the collagen adhesion protein Cpa are preferred GAS AI-1 surface proteins. Preferably, each of these GAS AI-1 surface proteins includes an LPXTG sortase substrate motif, such as LPXTG (SEQ ID NO: 122) or LPXSG (SEQ ID NO: 134) (conservative replacement of threonine with serine).

[0048] In addition to the open reading frames encoding the GAS AI-1 proteins, GAS AI-1 may also include a divergently transcribed transcriptional regulator such as rofA (i.e., the transcriptional regulator is located near or adjacent to the GAS AI protein open reading frames, but it transcribed in the opposite direction).

[0049] The GAS AI-1 surface proteins may be used alone, in combination with other GAS AI-1 surface proteins or in combination with other GAS AI surface proteins. Preferably, the immunogenic compositions of the invention include the GAS AI-1 fimbrial structural subunit (tee6) and the GAS AI-1 collagen binding protein. Still more preferably, the immunogenic compositions of the invention include the GAS AI-1 fimbrial structural subunit (tee6).

[0050] A second GAS adhesion island, “GAS Adhesin Island-2” or “GAS AI-2,” has also been identified in GAS serotypes. Amino acid sequences encoded by the open reading frames of GAS AI-2 may also be used in immunogenic compositions for the treatment or prevention of GAS infection.

[0051] A preferred immunogenic composition of the invention comprises a GAS AI-2 surface protein which may be formulated or purified in an oligomeric (pilus) form. In a preferred embodiment, the oligomeric form is a hyperoligomer. A preferred immunogenic composition of the invention alternatively comprises an isolated GAS AI-2 surface protein in oligomeric (pilus) form. The oligomer or hyperoligomeric pilus structures comprising GAS AI-2 surface proteins may be purified or otherwise formulated for use in immunogenic compositions.

[0052] GAS AI-2 comprises a series of approximately eight open reading frames encoding for a collection of amino acid sequences comprising surface proteins and sortases (“GAS AI-2 proteins”). GAS AI-2 preferably comprises surface proteins, a srtB sortase, a srtC1 sortase and a rofA divergently transcribed transcriptional regulator.

[0053] Specifically, GAS AI-2 includes polynucleotide sequences encoding for two or more of GAS15, Spy0127, GAS16, GAS17, GAS18, Spy0131, Spy0133, and GAS20.

[0054] One or more of the GAS AI-2 polynucleotide sequences may be replaced by a polynucleotide sequence coding for a fragment of the replaced ORF. Alternatively, one or more of the GAS AI-2 open reading frames may be replaced by a sequence having sequence homology (sequence identity) to the replaced ORF.

[0055] One or more of the GAS AI-2 surface proteins typically include an LPXTG motif (such as LPXTG (SEQ ID NO: 122)) or other sortase substrate motif. These sortase proteins are thought to be involved in the secretion and anchoring of the LPXTG containing surface proteins. GAS AI-2 may encode for at least one surface protein. Alternatively, GAS AI-2 may encode for at least two surface proteins and at least one sortase. Preferably, GAS AI-2 encodes for at least three surface proteins and at least two sortases. One or more of the surface proteins may include an LPXTG motif.

[0056] GAS AI-2 preferably includes a srtB sortase and a srtC1 sortase. As discussed above, GAS srtB sortases may preferably anchor surface proteins with an LPSTG motif (SEQ ID NO: 166), particularly where the motif is followed by a serine. GAS srtC1 sortase may preferentially anchor surface proteins with a V(P/V)PTG (SEQ ID NO: 167) motif. GAS srtC1 may be differentially regulated by rofA.

[0057] The GAS AI-2 protein of the composition may be selected from the group consisting of GAS15, Spy0127, GAS16, GAS17, GAS18, Spy0131, Spy0133, and GAS20. GAS AI-2 surface proteins GAS15 (Cpa), GAS16 (thought to be a fimbrial protein, M1_{—}128), GAS18 (M1_Spy0130), and GAS20 are preferred for use in the immunogenic compositions of the invention. GAS 16 is thought to form the shaft portion of the pilus like structure, while GAS 15 (the collagen adhesion protein Cpa) and GAS 18 are thought to act as accessory proteins facilitating the formation of the pilus structure, exposed on the surface of the bacterial capsule. Preferably, each of these GAS AI-2 surface proteins includes an LPXTG sortase substrate motif, such as LPXTG (SEQ ID NO: 122), VVXTG (SEQ ID NO: 135), or EVXTG (SEQ ID NO: 136).

[0058] In addition to the open reading frames encoding the GAS AI-2 proteins, GAS AI-2 may also include a divergently transcribed transcriptional regulator such as rofA (i.e., the transcriptional regulator is located near or adjacent to the GAS AI protein open reading frames, but it transcribed in the opposite direction). The GAS AI-2 surface proteins may be used alone, in combination with other GAS AI-2 surface proteins or in combination with other GAS AI surface proteins. Preferably, the immunogenic compositions of the invention include the GAS AI-2 fimbrial protein (GAS 16), the GAS AI-2 collagen binding protein (GAS 15) and GAS 18 (M1_Spy0130). More preferably, the immunogenic compositions of the invention include the GAS AI-2 fimbrial protein (GAS 16).

[0059] A third GAS adhesion island, “GAS Adhesin Island-3” or “GAS AI-3,” has also been identified in numerous GAS serotypes. Amino acid sequences encoded by the open reading frames of GAS AI-3 may also be used in immunogenic compositions for the treatment or prevention of GAS infection.

[0060] A preferred immunogenic composition of the invention comprises a GAS AI-3 surface protein which may be formulated or purified in an oligomeric (pilus) form. In a preferred embodiment, the oligomeric form is a hyperoligomer. A preferred immunogenic composition of the invention alternatively comprises an isolated GAS AI-3 surface protein in oligomeric (pilus) form. The oligomer or hyperoligomeric pilus structures comprising GAS AI-3 surface proteins may be purified or otherwise formulated for use in immunogenic compositions. GAS AI-3 comprises a series of approximately seven open reading frames encoding for a collection of amino acid sequences comprising surface proteins and sortases (“GAS AI-3 proteins”). GAS AI-3 preferably comprises surface proteins, a srtC2 sortase, and a Negative transcriptional regulator (Nra) divergently transcribed transcriptional regulator. GAS AI-3 surface proteins may include a collagen binding protein, a fimbrial protein, and a F2 like fibronectin-binding protein. GAS AI-3 surface proteins may also include a hypothetical surface protein. The fimbrial protein is thought to form the shaft portion of the pilus like structure, while the collagen adhesion protein (Cpa) and the hypothetical surface protein are thought to act as accessory proteins facilitating the formation of the pilus structure, exposed on the surface of the bacterial capsule. Preferred AI-3 surface proteins include the fimbrial proein, the collagen binding protein and the hypothetical protein. Preferably, each of these GAS AI-3 surface proteins include an LPXTG sortase substrate motif, such as LPXTG (SEQ ID NO: 122), VPXTG (SEQ ID NO: 137), QVXTG (SEQ ID NO: 138) or LPXAG (SEQ ID NO: 139).

[0061] Specifically, GAS AI-3 includes polynucleotide sequences encoding for two or more of SpyM3_{—}0098, SpyM3_{—}0099, SpyM3_{—}0100, SpyM3_{—}0101, SpyM3_{—}0102, SpyM3_{—}0103, SpyM3_{—}0104, Sps0100, Sps0101, Sps0102, Sps0103, Sps0104, Sps0105, Sps0106, orf78, orf79, orf80, orf81, orf82, orf83, orf84, spyM18_{—}0126, spyM18_{—}0127, spyM18_{—}0128, spyM18_{—}0129, spyM18_{—}0130, spyM18_{—}0131, spyM18_{—}0132, SpyoM0100156, SpyoM0100155, SpyoM0100154, SpyoM01000153, SpyoM01000152, SpyoM01000151, SpyoM01000150, SpyoM01000149, ISS3040_fimbrial, ISS3776_fimbrial, and ISS4959_fimbrial. In one embodiment, GAS AI-3 may include open reading frames encoding for two or more of SpyM3_{—}0098, SpyM3_{—}0099, SpyM3_{—}0100, SpyM3_{—}0101, SpyM3_{—}0102, SpyM3_{—}0103, and SpyM3_{—}0104. Alternatively, GAS AI-3 may include open reading frames encoding for two or more of Sps0100, Sps0101, Sps0102, Sps0103, Sps0104, Sps0105, and Sps0106. Alternatively, GAS AI-3 may include open reading frames encoding for two or more of orf78, orf79, orf80, orf81, orf82, orf83, and orf84. Alternatively, GAS AI-3 may include open reading frames encoding for two or more of spyM18_{—}0126, spyM18_{—}0127, spyM18_{—}0128, spyM18_{—}0129, spyM18_{—}0130, spyM18_{—}0131, and spyM18_{—}0132. Alternatively, GAS AI-3 may include open reading frames encoding for two or more of SpyoM01000156, SpyoM01000155, SpyoM01000154, SpyoM01000153, SpyoM01000152, SpyoM01000151, SpyoM01000150, and SpyoM01000149. Alternatively, GAS AI-1 may also include polynucleotide sequences encoding for any one of ISS3040_fimbrial, ISS3776_fimbrial, and ISS4959_fimbrial.

[0062] One or more of the GAS AI-3 polynucleotide sequences may be replaced by a polynucleotide sequence coding for a fragment of the replaced ORF. Alternatively, one or more of the GAS AI-3 open reading frames may be replaced by a sequence having sequence homology (sequence identity) to the replaced ORF.

[0063] One or more of the GAS AI-3 surface proteins typically include an LPXTG motif (such as LPXTG (SEQ ID NO: 122)) or other sortase substrate motif. These sortase proteins are thought to be involved in the secretion and anchoring of the LPXTG containing surface proteins. GAS AI-3 may encode for at least one surface protein. Alternatively, GAS AI-3 may encode for at least two surface proteins and at least one sortase. Preferably, GAS AI-3 encodes for at least three surface proteins and at least two sortases. One or more of the surface proteins may include an LPXTG motif.

[0064] GAS AI-3 preferably includes a srtC2 type sortase. GAS srtC2 type sortases may preferably anchor surface proteins with a QVPTG (SEQ ID NO: 140) motif, particularly when the motif is followed by a hydrophobic region and a charged C terminus tail. GAS SrtC2 may be differentially regulated by Nra.

[0065] The GAS AI-3 protein of the composition may be selected from the group consisting of SpyM3_{—}0098, SpyM3_{—}0099, SpyM3_{—}0100, SpyM3_{—}0101, SpyM3_{—}0102, SpyM3_{—}0103, SpyM3_{—}0104, Sps0100, Sps0101, Sps0102, Sps0103, Sps0104, Sps0105, Sps0106, orf78, orf79, orf80, orf81, orf82, orf83, orf84, spyM18_{—}0126, spyM18_{—}0127, spyM18_{—}0128, spyM18_{—}0129, spyM18_{—}0130, spyM18_{—}0131, spyM18_{—}0132, SpyoM01000156, SpyoM01000155, SpyoM01000154, SpyoM01000153, SpyoM01000152, SpyoM01000151, SpyoM01000150, SpyoM01000149, ISS3040_fimbrial, ISS3776_fimbrial, and ISS4959_fimbrial. GAS AI-3 surface proteins SpyM3_{—}0098, SpyM3_{—}0100, SpyM3_{—}0102, SpyM3_{—}0104, SPs0100, SPs0102, SPs0104, SPs0106, orf78, orf80, orf82, orf84, spyM18_{—}0126, spyM18_{—}0128, spyM18_{—}0130, spyM18_{—}0132, SpyoM01000155, SpyoM01000153, SpyoM01000151, SpyoM01000149, ISS3040_fimbrial, ISS3776_fimbrial, and ISS4959_fimbrial are preferred GAS AI-3 proteins for use in the immunogenic compositions of the invention.

[0066] In addition to the open reading frames encoding the GAS AI-3 proteins, GAS AI-3 may also include a transcriptional regulator such as Nra.

[0067] GAS AI-3 may also include a LepA putative signal peptidase I protein.

[0068] The GAS AI-3 surface proteins may be used alone, in combination with other GAS AI-3 surface proteins or in combination with other GAS AI surface proteins. Preferably, the immunogenic compositions of the invention include the GAS AI-3 fimbrial protein, the GAS AI-3 collagen binding protein, the GAS AI-3 surface protein (such as SpyM3_{—}0102, M3_Sps0104, M5_orf82, or spyM18_{—}0130), and fibronectin binding protein PrtF2. More preferably, the immunogenic compositions of the invention include the GAS AI-3 fimbrial protein, the GAS AI-3 collagen binding protein, and the GAS AI-3 surface protein. Still more preferably, the immunogenic compositions of the invention include the GAS AI-3 fimbrial protein.

[0069] Representative examples of the GAS AI-3 fimbrial protein include SpyM3_{—}0100, M3_Sps0102, M5_orf80, spyM18_{—}128, SpyoM01000153, ISS3040_fimbrial, ISS3776_fimbrial, ISS4959_fimbrial.

[0070] Representative examples of the GAS AI-3 collagen binding protein include SpyM3_{—}0098, M3_Sps0100, M5_orf 78, spyM18_{—}0126, and SpyoM01000155.

[0071] Representative examples of the GAS AI-3 fibronectin binding protein PrtF2 include SpyM3_{—}0104, M3_Sps0106, M5_orf84 and spyM18_{—}0132, and SpyoM01000149.

[0072] A fourth GAS adhesion island, “GAS Adhesin Island-4” or “GAS AI-4,” has also been identified in GAS serotypes. Amino acid sequences encoded by the open reading frames of GAS AI-4 may also be used in immunogenic compositions for the treatment or prevention of GAS infection.

[0073] A preferred immunogenic composition of the invention comprises a GAS AI-4 surface protein which may be formulated or purified in an oligomeric (pilus) form. In a preferred embodiment, the oligomeric form is a hyperoligomer. A preferred immunogenic composition of the invention alternatively comprises an isolated GAS AI-4 surface protein in oligomeric (pilus) form. The oligomer or hyperoligomeric pilus structures comprising GAS AI-3 surface proteins may be purified or otherwise formulated for use in immunogenic compositions. The oligomeric or hyperoligomeric pilus structures comprising GAS AI-4 surface proteins may be purified or otherwise formulated for use in immunogenic compositions.

[0074] GAS AI-4 comprises a series of approximately eight open reading frames encoding for a collection of amino acid sequences comprising surface proteins and sortases (“GAS AI-4 proteins”). This GAS adhesin island 4 (“GAS AI-4”) comprises surface proteins, a srtC2 sortase, and a RofA regulatory protein. GAS AI-4 surface proteins within may include a fimbrial protein, F1 and F2 like fibronectin-binding proteins, and a capsular polysaccharide adhesion protein (Cpa). GAS AI-4 surface proteins may also include a hypothetical surface protein in an open reading frame (orf).

[0075] The fimbral protein (EftLSL) is thought to form the shaft portion of the pilus like structure, while the collagen adhesion protein (Cpa) and the hypothetical protein are thought to act as accessory proteins facilitating the formation of the pilus structure, exposed on the surface of the bacterial capsule. Preferably, each of these GAS AI-4 surface proteins include an LPXTG sortase substrate motif, such as LPXTG (SEQ ID NO: 122), VPXTG (SEQ ID NO: 137), QVXTG (SEQ ID NO: 138) or LPXAG (SEQ ID NO: 139).

[0076] Specifically, GAS AI-4 includes polynucleotide sequences encoding for two or more of 19224134, 19224135, 19224136, 19224137, 19224138, 19224139, 19224140, and 19224141. A GAS AI-4 polynucleotide may also include polynucleotide sequences encoding for any one of 20010296_fimbrial, 20020069_fimbrial, CDC SS 635_fimbrial, ISS4883_fimbrial, ISS4538_fimbrial. One or more of the GAS AI-4 polynucleotide sequences may be replaced by a polynucleotide sequence coding for a fragment of the replaced ORF. Alternatively, one or more of the GAS AI-4 open reading frames may be replaced by a sequence having sequence homology (sequence identity) to the replaced ORF.

[0077] One or more of the GAS AI-4 surface proteins typically include an LPXTG motif (such as LPXTG (SEQ ID NO: 122)) or other sortase substrate motif. These sortase proteins are thought to be involved in the secretion and anchoring of the LPXTG containing surface proteins. GAS AI-4 may encode for at least one surface protein. Alternatively, GAS AI-4 may encode for at least two surface proteins and at least one sortase. Preferably, GAS AI-4 encodes for at least three surface proteins and at least two sortases. One or more of the surface proteins may include an LPXTG motif.

[0078] GAS AI-4 includes a SrtC2 type sortase. GAS SrtC2 type sortases may preferably anchor surface proteins with a QVPTG (SEQ ID NO: 140) motif, particularly when the motif is followed by a hydrophobic region and a charged C terminus tail.

[0079] The GAS AI-4 protein of the composition may be selected from the group consisting of 19224134, 19224135, 19224136, 19224137, 19224138, 19224139, 19224140, 19224141, 20010296_fimbrial, 20020069_fimbrial, CDC SS 635_fimbrial, ISS4883_fimbrial, and ISS4538_fimbrial. GAS AI-4 surface proteins 19224134, 19224135, 19224137, 19224139, 19224141, 20010296_fimbrial, 20020069_fimbrial, CDC SS 635_fimbrial, ISS4883_fimbrial, ISS4538_fimbrial are preferred proteins for use in the immunogenic compositions of the invention.

[0080] In addition to the open reading frames encoding the GAS AI-4 proteins, GAS AI-4 may also include a divergently transcribed transcriptional regulator such as RofA (i.e., the transcriptional regulator is located near or adjacent to the AI protein open reading frames, but it transcribed in the opposite direction.

[0081] GAS AI-4 may also include a LepA putative signal peptidase I protein and a MsmRL protein. The GAS AI-4 surface proteins may be used alone, in combination with other GAS AI-4 surface proteins or in combination with other GAS AI surface proteins. Preferably, the immunogenic compositions of the invention include the GAS AI-4 fimbrial protein (EftLSL or 20010296_fimbrial, 20020069_fimbrial, CDC SS 635_fimbrial, ISS4883_fimbrial, or ISS4538_fimbrial), the GAS AI-4 collagen binding protein, the GAS AI-4 surface protein (such as M12 isolate A735 orf 2), and fibronectin binding protein PrtF1 and PrtF2. More preferably, the immunogenic compositions of the invention include the GAS AI-4 fimbrial protein, the GAS AI-4 collagen binding protein, and the GAS AI-4 surface protein. Still more preferably, the immunogenic compositions of the invention include the GAS AI-4 fimbrial protein.

[0082] The GAS AI proteins of the invention may be used in immunogenic compositions for prophylactic or therapeutic immunization against GAS infection. For example, the invention may include an immunogenic composition comprising one or more GAS AI-1 proteins and one or more of any of GAS AI-2, GAS AI-3, or GAS AI-4 proteins. For example, the invention includes an immunogenic composition comprising at least two GAS AI proteins where each protein is selected from a different GAS adhesin island. The two GAS AI proteins may be selected from one of the following GAS AI combinations: GAS AI-1 and GAS AI-2; GAS AI-1 and GAS AI-3; GAS AI-1 and GAS AI-4; GAS AI-2 and GAS AI-3; GAS AI-2 and GAS AI-4; and GAS AI 3 and GAS AI-4. Preferably the combination includes fimbrial proteins from one or more GAS adhesin islands.

[0083] The immunogenic compositions may also be selected to provide protection against an increased range of GAS serotypes and strain isolates. For example, the immunogenic composition may comprise a first and second GAS AI protein, wherein a full length polynucleotide sequence encoding for the first GAS AI protein is not present in a genome comprising a full length polynucleotide sequence encoding for the second GAS AI protein. In addition, each antigen selected for use in the immunogenic compositions will preferably be present in the genomes of multiple GAS serotypes and strain isolates. Preferably, each antigen is present in the genomes of at least two (i.e., 3, 4, 5, 6, 7, 8, 9, 10, or more) GAS strain isolates. More preferably, each antigen is present in the genomes of at least two (i.e., at least 3, 4, 5, or more) GAS serotypes.

[0084] Applicants have also identified adhesin islands within the genome of Streptococcus pneumoniae. These adhesion islands are thought to encode surface proteins which are important in the bacteria's virulence. Amino acid sequence encoded by such S. pneumoniae Adhesin Islands may be used in immunogenic compositions for the treatment or prevention of S. pneumoniae infection. Preferred immunogenic compositions of the invention comprise a S. pneumoniae AI surface protein which has been formulated or purified in an oligomeric (pilus) form. In a preferred embodiment, the oligomeric form is a hyperoligomer. A preferred immunogenic composition of the invention alternatively comprises an isolated S. pneumoniae surface protein in oligomeric (pilus) form. The oligomer or hyperoligomeric pilus structures comprising S. pneumoniae surface proteins may be purified or otherwise formulated for use in immunogenic compositions.

[0085] The S. pneumoniae Adhesin Islands generally include a series of open reading frames within a S. pneumoniae genome that encode for a collection of surface proteins and sortases. A S. pneumoniae Adhesin Island may encode for an amino acid sequence comprising at least one surface protein. Alternatively, the S. pneumoniae Adhesin Island may encode for at least two surface proteins and at least one sortase. Preferably, a S. pneumoniae Adhesin Island encodes for at least three surface proteins and at least two sortases. One or more of the surface proteins may include an LPTXG motif (such as LPXTG (SEQ ID NO: 122)) or other sortase substrate motif. One or more S. pneumoniae AI surface proteins may participate in the formation of a pilus structure on the surface of the S. pneumoniae bacteria.

[0086] The S. pneumoniae Adhesin Islands of the invention preferably include a divergently transcribed transcriptional regulator. The transcriptional regulator may regulate the expression of the S. pneumonaie AI operon. An example of a transcriptional regulator found in S. pneumoniae AI sequences is rlrA.

[0087] A schematic of the organization of a S. pneumoniae AI locus is provided in FIG. 137. The locus comprises open reading frames encoding a transcriptional regulator (rlrA), cell wall surface proteins (rrgA, rrgB, rrgc) and sortases (srt B, srtC, srtD).

[0088] S. pneumoniae AI sequences may be generally divided into two groups of homology, S. pneuamoniae AI-a and AI-b. S. pneumoniae strains that comprise AI-a include 14 CSR 10, 19A Hungary 6, 23 F Poland 15, 670, 6B Finland 12, and 6B Spain 2. S. pneumoniae AI strains that comprise AI-b include 19F Taiwan 14, 9V Spain 3, 23F Taiwan 15 and TIGR 4.

[0089] S. pneumoniae AI from TIGR4 comprises a series of approximately seven open reading frames encoding for a collection of amino acid sequences comprising surface proteins and sortases (“S. pneumoniae AI proteins”). Specifically, S. pneumoniae AI from TIGR4 includes polynucleotide sequences encoding for two or more of SP0462, SP0463, SP0464, SP0465, SP0466, SP0467, and SP0468.

[0090] One or more of the S. pneumoniae AI from TIGR4 polynucleotide sequences may be replaced by a polynucleotide sequence coding for a fragment of the replaced ORF. Alternatively, one or more of the S. pneumoniae AI from TIGR4 open reading frames may be replaced by a sequence having sequence homology to the replaced ORF.

[0091] S. pneumoniae strain 670 AI comprises a series of approximately seven open reading frames encoding for a collection of amino acid sequences comprising surface proteins and sortases (“S. pneumoniae AI proteins”). Specifically, S. pneumoniae strain 670 AI includes polynucleotide sequences encoding for two or more of orf1_{—}670, orf3_{—}670, orf4_{—}670, orf5_{—}670, orf6_{—}670, orf7_{—}670, and orf8_{—}670.

[0092] One or more of the S. pneumoniae strain 670 AI polynucleotide sequences may be replaced by a polynucleotide sequence coding for a fragment of the replaced ORF. Alternatively, one or more of the S. pneumoniae strain 670 AI open reading frames may be replaced by a sequence having sequence homology to the replaced ORF.

[0093] S. pneumoniae AI from 14 CSR10 comprises a series of approximately seven open reading frames encoding for a collection of amino acid sequences comprising surface proteins and sortases (“S. pneumoniae AI proteins”). Specifically, S. pneumoniae AI from 14 CSR10 includes polynucleotide sequences encoding for two or more of ORF2_{—}14CSR, ORF3_{—}14CSR, ORF4_{—}14CSR, ORF5_{—}14CSR, ORF6_{—}14CSR, ORF7_{—}14CSR, and ORF8_{—}14CSR.

[0094] One or more of the S. pneumoniae AI from 14 CSR10 polynucleotide sequences may be replaced by a polynucleotide sequence coding for a fragment of the replaced ORF. Alternatively, one or more of the S. pneumoniae AI from 14 CSR10 open reading frames may be replaced by a sequence having sequence homology to the replaced ORF.

[0095] S. pneumoniae AI from 19A Hungary 6 comprises a series of approximately seven open reading frames encoding for a collection of amino acid sequences comprising surface proteins and sortases (“S. pneumoniae AI proteins”). Specifically, S. pneumoniae AI from 19A Hungary 6 includes polynucleotide sequences encoding for two or more of ORF2_{—}19AH, ORF3_{—}1 gAH, ORF4_{—}19AH, ORF5_{—}19AH, ORF6_{—}19AH, ORF7_{—}19AH, and ORF8_{—}19AH.

[0096] One or more of the S. pneumoniae AI from 19A Hungary 6 polynucleotide sequences may be replaced by a polynucleotide sequence coding for a fragment of the replaced ORF. Alternatively, one or more of the S. pneumoniae AI from 19A Hungary 6 open reading frames may be replaced by a sequence having sequence homology to the replaced ORF.

[0097] S. pneumoniae AI from 19F Taiwan 14 comprises a series of approximately seven open reading frames encoding for a collection of amino acid sequences comprising surface proteins and sortases (“S. pneumoniae AI proteins”). Specifically, S. pneumoniae AI from 19F Taiwan 14 includes polynucleotide sequences encoding for two or more of ORF2_{—}19FTW, ORF3_{—}19FTW, ORF4_{—}19FTW, ORF5_{—}19FTW, ORF6_{—}19FTW, ORF7_{—}19FTW, and ORF8_{—}19FTW.

[0098] One or more of the S. pneumoniae AI from 19F Taiwan 14 polynucleotide sequences may be replaced by a polynucleotide sequence coding for a fragment of the replaced ORF. Alternatively, one or more of the S. pneumoniae AI from 19F Taiwan 14 open reading frames may be replaced by a sequence having sequence homology to the replaced ORF.

[0099] S. pneumoniae AI from 23F Poland 16 comprises a series of approximately seven open reading frames encoding for a collection of amino acid sequences comprising surface proteins and sortases (“S. pneumoniae AI proteins”). Specifically, S. pneumoniae AI from 23F Poland 16 includes polynucleotide sequences encoding for two or more of ORF2_{—}23FP, ORF3_{—}23FP, ORF4_{—}23FP, ORF5_{—}23FP, ORF6_{—}23FP, ORF7_{—}23FP, and ORF8_{—}23FP.

[0100] One or more of the S. pneumoniae AI from 23F Poland 16 polynucleotide sequences may be replaced by a polynucleotide sequence coding for a fragment of the replaced ORF. Alternatively, one or more of the S. pneumoniae AI from 23F Poland 16 open reading frames may be replaced by a sequence having sequence homology to the replaced ORF.

[0101] S. pneumoniae AI from 23F Taiwan 15 comprises a series of approximately seven open reading frames encoding for a collection of amino acid sequences comprising surface proteins and sortases (“S. pneumoniae AI proteins”). Specifically, S. pneumoniae AI from 23F Taiwan 15 includes polynucleotide sequences encoding for two or more of ORF2_{—}23FTW, ORF3_{—}23FTW, ORF4_{—}23FTW, ORF5_{—}23FTW, ORF6_{—}23FTW, ORF7_{—}23FTW, and ORF8_{—}23FTW.

[0102] One or more of the S. pneumoniae AI from 23F Taiwan 15 polynucleotide sequences may be replaced by a polynucleotide sequence coding for a fragment of the replaced ORF. Alternatively, one or more of the S. pneumoniae AI from 23F Taiwan 15 open reading frames may be replaced by a sequence having sequence homology to the replaced ORF.

[0103] S. pneumoniae AI from 6B Finland 12 comprises a series of approximately seven open reading frames encoding for a collection of amino acid sequences comprising surface proteins and sortases (“S. pneumoniae AI proteins”). Specifically, S. pneumoniae AI from 6B Finland 12 includes polynucleotide sequences encoding for two or more of ORF2_{—}6BF, ORF3_{—}6BF, ORF4_{—}6BF, ORF5_{—}6BF, ORF6_{—}6BF, ORF7_{—}6BF, and ORF8_{—}6BF.

[0104] One or more of the S. pneumoniae AI from 6B Finland 12 polynucleotide sequences may be replaced by a polynucleotide sequence coding for a fragment of the replaced ORF. Alternatively, one or more of the S. pneumoniae AI from 6B Finland 12 open reading frames may be replaced by a sequence having sequence homology to the replaced ORF.

[0105] S. pneumoniae AI from 6B Spain 2 comprises a series of approximately seven open reading frames encoding for a collection of amino acid sequences comprising surface proteins and sortases (“S. pneumoniae AI proteins”). Specifically, S. pneumoniae AI from 6B Spain 2 includes polynucleotide sequences encoding for two or more of ORF2_{—}6BSP, ORF3_{—}6BSP, ORF4_{—}6BSP, ORF5_{—}6BSP, ORF6_{—}6BSP, ORF7_{—}6BSP, and ORF8_{—}6BSP.

[0106] One or more of the S. pneumoniae AI from 6B Spain 2 polynucleotide sequences may be replaced by a polynucleotide sequence coding for a fragment of the replaced ORF. Alternatively, one or more of the S. pneumoniae AI from 6B Spain 2 open reading frames may be replaced by a sequence having sequence homology to the replaced ORF.

[0107] S. pneumoniae AI from 9V Spain 3 comprises a series of approximately seven open reading frames encoding for a collection of amino acid sequences comprising surface proteins and sortases (“S. pneumoniae AI proteins”). Specifically, S. pneumoniae AI from 9V Spain 3 includes polynucleotide sequences encoding for two or more of ORF2_{—}9VSP, ORF3_{—}9VSP, ORF4_{—}9VSP, ORF5_{—}9VSP, ORF6_{—}9VSP, ORF7_{—}9VSP, and ORF8_{—}9VSP.

[0108] One or more of the S. pneumoniae AI from 9V Spain 3 polynucleotide sequences may be replaced by a polynucleotide sequence coding for a fragment of the replaced ORF. Alternatively, one or more of the S. pneumoniae AI from 9V Spain 3 open reading frames may be replaced by a sequence having sequence homology to the replaced ORF.

[0109] One or more of the S. pneumoniae AI surface proteins typically include an LPXTG motif (such as LPXTG (SEQ ID NO: 122)) or other sortase substrate motif. These sortase proteins are thought to be involved in the secretion and anchoring of the LPXTG containing surface proteins. S. pneumoniae AI may encode for at least one surface protein. The Adhesin Island, may encode at least one surface protein. Alternatively, S. pneumoniae AI may encode for at least two surface proteins and at least one sortase. Preferably, S. pneumoniae AI encodes for at least three surface proteins and at least two sortases. One or more of the surface proteins may include an LPXTG motif.

[0110] The S. pneumoniae AI protein of the composition may be selected from the group consisting of SP0462, SP0463, SP0464, SP0465, SP0466, SP0467, SP0468, orf1_{—}670, orf5_{—}670, orf4_{—}670, orf5_{—}670, orf6_{—}670, orf7_{—}670, orf8_{—}670, ORF2_{—}14CSR, ORF3_{—}14CSR, ORF4_{—}14CSR, ORF5_{—}14CSR, ORF6_{—}14CSR, ORF7_{—}14CSR, ORF8_{—}14CSR, ORF2_{—}19AH, ORF3_{—}19AH, ORF4_{—}19AH, ORF5_{—}9AH, ORF6_{—}19AH, ORF7_{—}19AH, ORF8_{—}19AH, ORF2_{—}19FTW, ORF3_{—}19FTW, ORF4_{—}19FTW, ORF5_{—}19FTW, ORF6_{—}19FTW, ORF7_{—}19FTW, ORF8_{—}19FTW, ORF2_{—}23FP, ORF3_{—}23FP, ORF4_{—}23FP, ORF5_{—}23FP, ORF6_{—}23FP, ORF7_{—}23FP, ORF8_{—}23FP, ORF2_{—}23FTW, ORF3_{—}23FTW, ORF4_{—}23FTW, ORF5_{—}23FTW, ORF6_{—}23FTW, ORF7_{—}23FTW, ORF8_{—}23FTW, ORF2_{—}6BF, ORF3_{—}6BF, ORF4_{—}6BF, ORF5_{—}6BF, ORF6_{—}6BF, ORF7_{—}6BF, ORF8_{—}6BF, ORF2_{—}6BSP, ORF3_{—}6BSP, ORF4_{—}6BSP, ORF5_{—}6BSP, ORF6_{—}6BSP, ORF7_{—}6BSP, ORF8_{—}6BSP, ORF2_{—}9VSP, ORF3_{—}9VSP, ORF4_{—}9VSP, ORF5_{—}9VSP, ORF6_{—}9VSP, ORF7_{—}9VSP and, ORF8_{—}9VSP.

[0111] S. pneumoniae AI surface proteins are preferred proteins for use in the immunogenic compositions of the invention. In one embodiment, the compositions of the invention comprise combinations of two or more S pneumoniae AI surface proteins. Preferably such combinations are selected from two or more of the group consisting of SP0462, SP0463, SP0464, orf3_{—}670, orf4_{—}670, orf5_{—}670, ORF3_{—}14CSR, ORF4_{—}14CSR, ORF5_{—}14CSR, ORF3_{—}19AH, ORF4_{—}19AH, ORF5_{—}19AH, ORF3_{—}19FTW, ORF4_{—}19FTW, ORF5_{—}1 gFTW, ORF3_{—}23FP, ORF4_{—}23FP, ORF5_{—}23FP, ORF3_{—}23FTW, ORF4_{—}23FTW, ORF5_{—}23FTW, ORF3_{—}6BF, ORF4_{—}6BF, ORF5_{—}6BF, ORF3_{—}6BSP, ORF4_{—}6BSP, ORF5_{—}6BSP, ORF3_{—}9VSP, ORF4_{—}9VSP, and ORF5_{—}9VSP.

[0112] In addition to the open reading frames encoding the S. pneumoniae AI proteins, S. pneumoniae AI may also include a transcriptional regulator.

[0113] The S. pneumoniae AI proteins of the invention may be used in immunogenic compositions for prophylactic or therapeutic immunization against S. pneumoniae infection. For example, the invention may include an immunogenic composition comprising one or more S. pneumoniae from TIGR4 AI proteins and one or more S. pneumoniae strain 670 proteins. The immunogenic composition may comprise one or more AI proteins from any one or more of S. pneumoniae strains TIGR4, 19A Hungary 6, 6B Finland 12, 6B Spain 2, 9V Spain 3, 14 CSR 10, 19F Taiwan 14, 23F Taiwan 15, 23F Poland 16, and 670.

[0114] The immunogenic compositions may also be selected to provide protection against an increased range of S. pneumoniae serotypes and strain isolates. For example, the immunogenic composition may comprise a first and second S. pneumoniae AI protein, wherein a full length polynucleotide sequence encoding for the first S. pneumoniae AI protein is not present in a genome comprising a full length polynucleotide sequence encoding for the second S. pneumoniae AI protein. In addition, each antigen selected for use in the immunogenic compositions will preferably be present in the genomes of multiple S. pneumoniae serotypes and strain isolates. Preferably, each antigen is present in the genomes of at least two (i.e., 3, 4, 5, 6, 7, 8, 9, 10, or more) S. pneumoniae strain isolates. More preferably, each antigen is present in the genomes of at least two (i.e., at least 3, 4, 5, or more) S. pneumoniae serotypes.

[0115] The immunogenic compositions may also be selected to provide protection against an increased range of serotypes and strain isolates of a Gram positive bacteria. For example, the immunogenic composition may comprise a first and second Gram positive bacteria AI protein, wherein a full length polynucleotide sequence encoding for the first Gram positive bacteria AI protein is not present in a genome comprising a full length polynucleotide sequence encoding for the second Gram positive bacteria AI protein. In addition, each antigen selected for use in the immunogenic compositions will preferably be present in the genomes of multiple serotypes and strain isolates of the Gram positive bacteria. Preferably, each antigen is present in the genomes of at least two (i.e., 3, 4, 5, 6, 7, 8, 9, 10, or more) Gram positive bacteria strain isolates. More preferably, each antigen is present in the genomes of at least two (i.e., at least 3, 4, 5, or more) Gram positive bacteria serotypes. One or both of the first and second AI proteins may preferably be in oligomeric or hyperoligomeric form.

[0116] Adhesin island surface proteins from two or more Gram positive bacterial genus or species may be combined to provide an immunogenic composition for prophylactic or therapeutic treatment of disease or infection of two more Gram positive bacterial genus or species. Optionally, the adhesin island surface proteins may be associated together in an oligomeric or hyperoligomeric structure.

[0117] In one embodiment, the invention comprises adhesin island surface proteins from two or more Streptococcus species. For example, the invention includes a composition comprising a GBS AI surface protein and a GAS adhesin island surface protein. As another example, the invention includes a composition comprising a GAS adhesin island surface protein and a S. pneumoniae adhesin island surface protein. One or both of the GAS AI surface protein and the S. pneumoniae AI surface protein may be in oligomeric or hyperoligomeric form. As a further example, the invention includes a composition comprising a GBS adhesin island surface protein and a S. pneumoniae adhesin island surface protein.

[0118] In one embodiment, the invention comprises an adhesin island surface protein from two or more Gram positive bacterial genus. For example, the invention includes a composition comprising a Streptococcus adhesin island protein and a Corynebacterium adhesin island protein. One or more of the Gram positive bacteria AI surface proteins may be in an oligomeric or hyperoligomeric form.

[0119] In addition, the AI polynucleotides and amino acid sequences of the invention may also be used in diagnostics to identify the presence or absence of GBS (or a Gram positive bacteria) in a biological sample. They may be used to generate antibodies which can be used to identify the presence of absence of an AI protein in a biological sample or in a prophylactic or therapeutic treatment for GBS (or a Gram positive bacterial) infection. Further, the AI polynucleotides and amino acid sequences of the invention may also be used to identify small molecule compounds which inhibit or decrease the virulence associated activity of the AI.

### BRIEF DESCRIPTION OF THE FIGURES

[0120] FIG. 1 presents a schematic depiction of Adhesin Island 1 (“AI-1”) comprising open reading frames for GBS 80, GBS 52, SAG0647, SAG0648 and GBS 104.

[0121] FIG. 2 illustrates the identification of AI-1 sequences in several GBS serotypes and strain isolates (GBS serotype V, strain isolate 2603; GBS serotype III, strain isolate nem316; GBS serotype II, strain isolate 18RS21; GBS serotype V, strain isolate CJB111; GBS serotype III, strain isolate COH1 and GBS serotype 1a, strain isolate A909). (An AI-1 was not identified in GBS serotype 1b, strain isolate H36B or GBS serotype 1a, strain isolate 515).

[0122] FIG. 3 presents a schematic depiction of the correlation between AI-1 and the Adhesin Island 2 (“AI-2”) within the GBS serotype V, strain isolate 2603 genome. (This AI-2 comprises open reading frames for GBS 67, GBS 59, SAG1406, SAG1405 and GBS 150).

[0123] FIG. 4 illustrates the identification of AI-2 comprising open reading frames encoding for GBS 67, GBS 59, SAG1406, SAG1404 and GBS 150 (or sequences having sequence homology thereto) in several GBS serotypes and strain isolates (GBS serotype V, strain isolate 2603; GBS serotype III, strain isolate NEM316; GBS serotype 1b, strain isolate H36B; GBS serotype V, strain isolate CJB111; GBS serotype II, strain isolate 18RS21; and GBS serotype 1a, strain isolate 515).

[0124] FIG. 4 also illustrates the identification of AI-2 comprising open reading frames encoding for 01520 (a sortase), 01521, 01522 (a sortase), 01523 (spb1), 01524 and 01525 (or sequences having sequence homology thereto).

[0125] FIG. 5 presents data showing that GBS 80 binds to fibronectin and fibrinogen in ELISA.

[0126] FIG. 6 illustrates that all genes in AI-1 are co-transcribed as an operon.

[0127] FIG. 7 presents schematic depictions of in-frame deletion mutations within AI-1.

[0128] FIG. 8 presents FACS data showing that GBS 80 is required for surface localization of GBS 104.

[0129] FIG. 9 presents FACS data showing that sortases SAG0647 and SAG0648 play a semi-redundant role in surface exposure of GBS 80 and GBS 104.

[0130] FIG. 10 presents Western Blots of the in-frame deletion mutants probed with anti-GBS80 and anti-GBS 104 antisera.

[0131] FIG. 11: Electron micrograph of surface exposed pili structures in Streptococcus agalactiae containing GBS 80.

[0132] FIG. 12: PHD predicted secondary structure of GBS 067.

[0133] FIGS. 13, 14 and 15: Electron micrograph of surface exposed pili structures of strain isolate COH1 of Streptococcus agalactiae containing a plasmid insert encoding GBS 80.

[0134] FIGS. 16 and 17: Electron micrograph of surface exposed pili structure of wild type strain isolate COH1 of Streptococcus agalactiae.

[0135] FIG. 18: Alignment of polynucleotide sequences of AI-1 from serotype V, strain isolates 2603 and CJB111; serotype II, strain isolate 18RS21; serotype HI, strain isolates COH1 and NEM316; and serotype 1a, strain isolate A909.

[0136] FIG. 19: Alignment of polynucleotide sequences of AI-2 from serotype V, strain isolates 2603 and CJB111; serotype II, strain isolate 18RS21; serotype 1b, strain isolate H36B; and serotype 1a, strain isolate 515.

[0137] FIG. 20: Alignment of polynucleotide sequences of AI-2 from serotype V, strain isolate 2603 and serotype III, strain isolate NEM316.

[0138] FIG. 21: Alignment of polynucleotide sequences of AI-2 from serotype III, strain isolate COH1 and serotype Ia, strain isolate A909.

[0139] FIG. 22: Alignment of amino acid sequences of AI-1 surface protein GBS 80 from serotype V, strain isolates 2603 and CJB111; serotype 1a, strain isolate A909; serotype III, strain isolates COH1 and NEM316.

[0140] FIG. 23: Alignment of amino acid sequences of AI-1 surface protein GBS 104 from serotype V, strain isolates 2603 and CJB111; serotype III, strain isolates COH1 and NEM316; and serotype II, strain isolate 18RS21.

[0141] FIG. 24: Alignment of amino acid sequences of AI-2 surface protein GBS 067 from serotype V, strain isolates 2603 and CJB111; serotype 1a, strain isolate 515; serotype II, strain isolate 18RS21; serotype Ib, strain isolate H36B; and serotype III, strain isolate NEM316.

[0142] FIG. 25: Illustrates that GBS closely associates with tight junctions and cross the monolayer of ME180 cervical epithelial cells by a paracellular route.

[0143] FIG. 26: Illustrates GBS infection of ME180 cells.

[0144] FIG. 27: Illustrates that GBS 80 recombinant protein does not bind to epithelial cells.

[0145] FIG. 28: Illustrates that deletion of GBS 80 does not effect the capacity of GBS strain 2603 V/R to adhere and invade ME180 cervical epithelial cells.

[0146] FIG. 29: Illustrates binding of recombinant GBS 104 protein to epithelial cells.

[0147] FIG. 30: Illustrates that deletion of GBS 104 in the GBS strain COH1, reduces the capacity of GBS to adhere to ME180 cervical epithelial cells.

[0148] FIG. 31: Illustrates that GBS 80 knockout mutant strain partially loses the ability to translocate through an epithelial cell monolayer.

[0149] FIG. 32: Illustrates that deletion of GBS 104, but not GBS 80, reduces the capacity of GBS to invade J774 macrophage-like cell line.

[0150] FIG. 33: Illustrates that GBS 104 knockout mutant strain translocates through an epithelial monolayer less efficiently than the isogenic wild type.

[0151] FIG. 34: Negative stained electron micrographs of GBS serotype III, strain isolate COH1, containing a plasmid insert to over-express GBS 80.

[0152] FIG. 35: Electron micrographs of surface exposed pili structures on GBS serotype III, strain isolate COH1, containing a plasmid insert to over-express GBS 80, stained with anti-GBS 80 antibodies (visualized with 10 nm gold particles).

[0153] FIG. 36: Electron micrographs of surface exposed pili structures on GBS serotype III, strain isolate COH1, containing a plasmid insert to over-express GBS 80, stained with anti-GBS 80 antibodies (visualized with 10 nm gold particles).

[0154] FIG. 37: Electron micrographs of surface exposed pili structures on GBS serotype III, strain isolate COH1, containing a plasmid insert to over-express GBS 80, stained with anti-GBS 80 antibodies (visualized with 20 nm gold particles).

[0155] FIG. 38: Electron micrographs of surface exposed pili structures on GBS serotype III, strain isolate COH1, containing a plasmid insert to over-express GBS 80, stained with anti-GBS 104 antibodies or preimmune sera (visualized with 10 nm gold particles).

[0156] FIG. 39: Electron micrographs of surface exposed pili structures on GBS serotype III, strain isolate COH1, containing a plasmid insert to over-express GBS 80, stained with anti-GBS 80 antibodies (visualized with 20 nm gold particles) and anti-GBS 104 antibodies (visualized with 10 nm gold particles).

[0157] FIG. 40: Electron micrographs of surface exposed pili structures on GBS serotype III, strain isolate COH1, containing a plasmid insert to over-express GBS 80, stained with anti-GBS 80 antibodies (visualized with 20 nm gold particles) and anti-GBS 104 antibodies (visualized with 10 nm gold particles).

[0158] FIG. 41: Illustrates that GBS 80 is necessary for polymer formation and GBS104 and sortase SAG0648 are necessary for efficient assembly of pili.

[0159] FIG. 42: Illustrates that GBS 67 is part of a second pilus and that GBS 80 is polymerized in strain 515.

[0160] FIG. 43: Illustrates that two macro-molecules are visible in Coh1, one of which is the GBS 80 pilin.

[0161] FIG. 44: Illustrates pilin assembly.

[0162] FIG. 45: Illustrates that GBS 52 is a minor component of the GBS pilus.

[0163] FIG. 46: Illustrates that the pilus is found in the supernatant of a bacterial culture.

[0164] FIG. 47: Illustrates that the pilus is found in the supernatant of bacterial cultures in all phases.

[0165] FIG. 48: Illustrates that in Coh1, only the GBS 80 protein and one sortase (sag0647 or sag0648) is required for polymerization.

[0166] FIG. 49: IEM image of GBS 80 staining of a GBS serotype VIII strain JM9030013 that express pili.

[0167] FIG. 50: IEM image of GBS 104 staining of a GBS serotype VIII strain JM9030013 that express pili.

[0168] FIG. 51A: Schematic depiction of open reading frames comprising a GAS AI-2 serotype M1 isolate, GAS AI-3 serotype M3, M5, M18, and M49 isolates, a GAS AI-4 serotype M12 isolate, and an GAS AI-1 serotype M6 isolate.

[0169] FIG. 51B: Amino acid alignment of SrtC1-type sortase of a GAS AI-2 serotype M1 isolate, SrtC2-type sortases of serotype M3, M5, M118, and M49 isolates, and a SrtC2-type sortase of a GAS AI-4 serotype M12 isolate.

[0170] FIG. 52: Amino acid alignment of the capsular polysaccharide adhesion proteins of GAS AI-4 serotype M12 (A735), GAS AI-3 serotype M5 (Manfredo), S. pyogenes strain MGAS315 serotype M3, S. pyogenes strain SSI-1 serotype M3, S. pyogenes strain MGAS8232 serotype M3, and GAS AI-2 serotype M1.

[0171] FIG. 53: Amino acid alignment of F-like fibronectin-binding proteins of GAS AI-4 serotype M12 (A735) and S. pyogenes strain MGAS10394 serotype M6.

[0172] FIG. 54: Amino acid alignment of F2-like fibronectin-binding proteins of GAS AI-4 serotype M12 (A735), S. pyogenes strain MGAS8232 serotype M3, GAS AI-3 strain M5 (Manfredo), S. pyogenes strain SSI serotype M3, and S. pyogenes strain MGAS315 serotype M3.

[0173] FIG. 55: Amino acid alignment of fimbrial proteins of GAS AI-4 serotype M12 (A735), GAS AI-3 serotype M5 (Manfredo), S. pyogenes strain MGAS315 serotype M3, S. pyogenes strain SSI serotype M3, S. pyogenes strain MGAS8232 serotype M3, and S. pyogenes M1 GAS serotype M1.

[0174] FIG. 56: Amino acid alignment of hypothetical proteins of GAS AI-4 serotype M12 (A735), S. pyogenes strain MGAS315 serotype M3, S. pyogenes strain SSI-1 serotype M3, GAS AI-3 serotype M5 (Manfredo), and S. pyogenes strain MGAS8232 serotype M3.

[0175] FIG. 57: Results of FASTA homology search for amino acid sequences that align with the collagen adhesion protein of GAS AI-1 serotype M6 (MGAS10394).

[0176] FIG. 58: Results of FASTA homology search for amino acid sequences that align with the fimbrial structural subunit of GAS AI-1 serotype M6 (MGAS10394).

[0177] FIG. 59: Results of FASTA homology search for amino acid sequences that align with the hypothetical protein of GAS AI-2 serotype M1 (SF370).

[0178] FIG. 60: Specifies pilin and E box motifs present in GAS type 3 and 4 adhesin islands.

[0179] FIG. 61: Illustrates that surface expression of GBS 80 protein on GBS strains COH and JM9130013 correlates with formation of pili structures. Surface expression of GBS 80 was determined by FACS analysis using an antibody that cross-hybridizes with GBS 80. Formation of pili structures was determined by immunogold electron microscopy using gold-labelled anti-GBS 80 antibody.

[0180] FIG. 62: Illustrates that surface exposure is capsule-dependent for GBS 322 but not for GBS 80.

[0181] FIG. 63: Illustrates the amino acid sequence identity of GBS 59 proteins in GBS strains.

[0182] FIG. 64: Western blotting of whole GBS cell extracts with anti-GBS 59 antibodies.

[0183] FIG. 65: Western blotting of purified GBS 59 and whole GBS cell extracts with anti-GBS 59 antibodies.

[0184] FIG. 66: FACS analysis of GBS strains CJB111, 7357B, 515 using GBS 59 antiserum.

[0185] FIG. 67: Illustrates that anti-GBS 59 antibodies are opsonic for CJB111 GBS strain serotype V.

[0186] FIG. 68: Western blotting of GBS strain JM9130013 total extracts.

[0187] FIG. 69: Western blotting of GBS stain 515 total extracts shows that GBS 67 and GBS 150 are parts of a pilus.

[0188] FIG. 70: Western blotting of GBS strain 515 knocked out for GBS 67 expression

[0189] FIG. 71: FACS analysis of GBS strain 515 and GBS strain 515 knocked out for GBS 67 expression using GBS 67 and GBS 59 antiserum.

[0190] FIG. 72: Illustrates complementation of GBS 515 knocked out for GBS 67 expression with a construct overexpressing GBS 80.

[0191] FIG. 73: FACS analysis of GAS serotype M6 for spyM6_{—}0159 surface expression.

[0192] FIG. 74: FACS analysis of GAS serotype M6 for spyM6_{—}0160 surface expression.

[0193] FIG. 75: FACS analysis of GAS serotype M1 for GAS 15 surface expression.

[0194] FIG. 76: FACS analysis of GAS serotype M1 for GAS 16 surface expression using a first anti-GAS 16 antiserum.

[0195] FIG. 77: FACS analysis of GAS serotype M1 for GAS 18 surface expression using a first anti-GAS 18 antiserum.

[0196] FIG. 78: FACS analysis of GAS serotype M1 for GAS 18 surface expression using a second anti-GAS 18 antiserum.

[0197] FIG. 79: FACS analysis of GAS serotype M1 for GAS 16 surface expression using a second anti-GAS 16 antisera.

[0198] FIG. 80: FACS analysis of GAS serotype M3 for spyM3_{—}0098 surface expression.

[0199] FIG. 81: FACS analysis of GAS serotype M3 for spyM3_{—}0100 surface expression.

[0200] FIG. 82: FACS analysis of GAS serotype M3 for spyM3_{—}0102 surface expression.

[0201] FIG. 83: FACS analysis of GAS serotype M3 for spyM3_{—}0104 surface expression.

[0202] FIG. 84: FACS analysis of GAS serotype M3 for spyM3_{—}0106 surface expression.

[0203] FIG. 85: FACS analysis of GAS serotype M12 for 19224134 surface expression.

[0204] FIG. 86: FACS analysis of GAS serotype M12 for 19224135 surface expression.

[0205] FIG. 87: FACS analysis of GAS serotype M12 for 19224137 surface expression.

[0206] FIG. 88: FACS analysis of GAS serotype M12 for 19224141 surface expression.

[0207] FIG. 89: Western blot analysis of GAS 15 expression on GAS M1 bacteria.

[0208] FIG. 90: Western blot analysis of GAS 15 expression using GAS 15 immune sera.

[0209] FIG. 91: Western blot analysis of GAS 15 expression using GAS 15 pre-immune sera.

[0210] FIG. 92: Western blot analysis of GAS 16 expression on GAS M1 bacteria.

[0211] FIG. 93: Western blot analysis of GAS 16 expression using GAS 16 immune sera.

[0212] FIG. 94: Western blot analysis of GAS 16 expression using GAS 16 pre-immune sera.

[0213] FIG. 95: Western blot analysis of GAS 18 on GAS M1 bacteria.

[0214] FIG. 96: Western blot analysis of GAS 18 using GAS 18 immune sera.

[0215] FIG. 97: Western blot analysis of GAS 18 using GAS 18 pre-immune sera.

[0216] FIG. 98: Western blot analysis of M6_Spy0159 expression on GAS bacteria.

[0217] FIG. 99: Western blot analysis of 19224135 expression on M12 GAS bacteria.

[0218] FIG. 100: Western blot analysis of 19224137 expression on M12 GAS bacteria.

[0219] FIG. 101: Full length nucleotide sequence of an S. pneumoniae strain 670 μl.

[0220] FIG. 102: Western blot analysis of GAS 15, GAS 16, and GAS 18 in GAS M1 strain 2580.

[0221] FIG. 103: Western blot analysis of GAS 15, GAS 16, and GAS 18 in GAS M1 strain 2913.

[0222] FIG. 104: Western blot analysis of GAS 15, GAS 16, and GAS 18 in GAS M1 strain 3280.

[0223] FIG. 105: Western blot analysis of GAS 15, GAS 16, and GAS 18 in GAS M1 strain 3348.

[0224] FIG. 106: Western blot analysis of GAS 15, GAS 16, and GAS 18 in GAS M1 strain 2719.

[0225] FIG. 107: Western blot analysis of GAS 15, GAS 16, and GAS 18 in GAS M1 strain SF370.

[0226] FIG. 108: Western blot analysis of 19224135 and 19224137 in GAS M12 strain 2728.

[0227] FIG. 109: Western blot analysis of 19224139 in GAS M12 strain 2728 using antisera raised against SpyM3_{—}0102.

[0228] FIG. 110: Western blot analysis of M6_Spy0159 and M6_Spy0160 in GAS M6 strain 2724.

[0229] FIG. 111: Western blot analysis of M6 Spy0159 and M6 Spy0160 in GAS M6 strain SF370.

[0230] FIG. 112: Western blot analysis of M6_Spy160 in GAS M6 strain 2724.

[0231] FIGS. 113-115: Electron micrographs of surface exposed GAS 15 on GAS M1 strain SF370.

[0232] FIGS. 116-121: Electron micrographs of surface exposed GAS 16 on GAS M1 strain SF370.

[0233] FIGS. 122-125: Electron micrographs of surface exposed GAS 18 on GAS M1 strain SF370 detected using anti-GAS 18 antisera.

[0234] FIG. 126: IEM image of a hyperoligomer on GAS M1 strain SF370 detected using anti-GAS 18 antisera.

[0235] FIGS. 127-132: IEM images of oligomeric and hyperoligomeric structures containing M6_Spy0160 extending from the surface of GAS serotype M6 3650.

[0236] FIGS. 133A and B: Western blot analysis of L. lactis transformed to express GBS 80 with anti-GBS 80 antiserum.

[0237] FIG. 134: Western blot analyses of L. lactis transformed to express GBS AI-1 with anti-GBS 80 antiserum.

[0238] FIG. 135: Ponceau staining of same acrylamide gel as used in FIG. 134.

[0239] FIG. 136A: Western blot analysis of sonicated pellets and supernatants of cultured L. lactis transformed to express GBS AI-1 polypeptides using anti-GBS 80 antiserum.

[0240] FIG. 136B: Polyacrylamide gel electrophoresis of sonicated pellets and supernatants of cultured L. lactis transformed to express GBS AI polypeptides.

[0241] FIG. 137: Depiction of an example S. pneumoniae AI locus.

[0242] FIG. 138: Schematic of primer hybridization sites within the S. pneumoniae AI locus of FIG. 137.

[0243] FIG. 139A: The set of amplicons produced from the S. pneumoniae strain TIGR4 AI locus.

[0244] FIG. 139B: Base pair lengths of amplicons produced from FIG. 139A primers in S. pneumoniae strain TIGR4.

[0245] FIG. 140: CGH analysis of S. pneumoniae strains for the AI locus.

[0246] FIG. 141: Amino acid sequence alignment of polypeptides encoded by AI orf 2 in S. pneumoniae AI-positive strains.

[0247] FIG. 142: Amino acid sequence alignment of polypeptides encoded by AI orf 3 in S. pneumoniae AI-positive strains.

[0248] FIG. 143: Amino acid sequence alignment of polypeptides encoded by AI orf 4 in S. pneumoniae AI-positive strains.

[0249] FIG. 144: Amino acid sequence alignment of polypeptides encoded by AI orf 5 in S. pneumoniae AI-positive strains.

[0250] FIG. 145: Amino acid sequence alignment of polypeptides encoded by AI orf 6 in S. pneumoniae AI-positive strains.

[0251] FIG. 146: Amino acid sequence alignment of polypeptides encoded by AI orf 7 in S. pneumoniae AI-positive strains.

[0252] FIG. 147: Amino acid sequence alignment of polypeptides encoded by AI orf 8 in S. pneumoniae AI-positive strains.

[0253] FIG. 148: Diagram comparing amino acid sequences of RrgA in S. pneumoniae strains.

[0254] FIG. 149: Amino acid sequence comparison of RrgB S. pneumoniae strains.

[0255] FIG. 150A: Sp0462 amino acid sequence.

[0256] FIG. 150B: Primers used to produce a clone encoding the Sp0462 polypeptide.

[0257] FIG. 151A: Schematic depiction of recombinant Sp0462 polypeptide.

[0258] FIG. 151B: Schematic depiction of full-length Sp0462 polypeptide.

[0259] FIG. 152A: Western blot probed with serum obtained from S. pneumoniae-infected patients for Sp0462.

[0260] FIG. 152B: Western blot probed with GBS 80 serum for Sp0462.

[0261] FIG. 153A: Sp0463 amino acid sequence.

[0262] FIG. 153B: Primers used to produce a clone encoding the Sp0463 polypeptide.

[0263] FIG. 154A: Schematic depiction of recombinant Sp0463 polypeptide.

[0264] FIG. 154B: Schematic depiction of full-length Sp0463 polypeptide.

[0265] FIG. 155: Western blot detection of recombinant Sp0463 polypeptide.

[0266] FIG. 156: Western blot detection of high molecular weight Sp0463 polymers.

[0267] FIG. 157A: Sp0464 amino acid sequence.

[0268] FIG. 157B: Primers used to produce a clone encoding the Sp0464 polypeptide.

[0269] FIG. 158A: Schematic depiction of recombinant Sp0464 polypeptide.

[0270] FIG. 158B: Schematic depiction of full-length Sp0464 polypeptide.

[0271] FIG. 159: Western blot detection of recombinant Sp0464 polypeptide.

[0272] FIG. 160: Amplification products prepared for production of Sp0462, Sp0463, and Sp0464 clones.

[0273] FIG. 161: Opsonic killing by anti-sera raised against L. lactis expressing GBS AI

[0274] FIG. 162: Schematic depicting GAS adhesin islands GAS AI-1, GAS AI-2, GAS AI-3 and GAS AI-4.

[0275] FIGS. 163 A-D: Immunoblots of cell-wall fractions of GAS strains with antisera specific for LPXTG proteins of M6_ISS3650 (A), M1_SF370 (B), M5_ISS4883 (C) and M12_{—}20010296 (D).

[0276] FIGS. 163 E-H: Immunoblots of cell-wall fractions of deletion mutants M1_SF370Δ128 (E) M1_SF370Δ130 (F) M1_SF370ΔSrtC1 (G) and the M1_{—}128 deletion strain complemented with plasmid pAM::128 which contains the M1_{—}128 gene (H) with antisera specific for the pilin components of M1_SF370.

[0277] FIGS. 163 I-N: Immunogold labelling and transmission electron microscopy of: T6 (I) and Cpa (J) in M6_ISS3650; M1_{—}128 in M1_SF370 (K) and deletion strain M1_SF370Δ128 (N); M5_orf80 in M5_ISS4883 (L); M12_EftLSL.A in M12_{—}20010296 (M). The strains used are indicated below the panels. Bars=200 nm.

[0278] FIG. 164: Schematic representation of the FCT region from 7 GAS strains

[0279] FIGS. 165 A-H: Flow cytometry of GAS bacteria treated or not with trypsin and stained with sera specific for the major pilus component. Preimmune staining; black lines, untreated bacteria; green lines and trypsin treated bacteria; blue lines. M6_ISS3650 stained with sera which recognize the M6 protein (A) or anti-M6_T6 (B), M1_SF370 stained with anti-M1 (C) or anti-M1_{—}128 (D), M5_ISS4883 stained with anti-PrtF (E) or anti-M5_orf80 (F) and M12_{—}20010296 with anti-M12 (G) or anti-EftLSL.A (H)

[0280] FIGS. 166 A-C: Immunoblots of recombinant pilin components with polyvalent Lancefield T-typing sera. The recombinant proteins are shown above the blot and the sera pool used is shown below the blot.

[0281] FIGS. 166 D-G: Immunoblots of pilin proteins with monovalent T-typing sera. The recombinant proteins are shown below the blot and the sera used above the blot.

[0282] FIG. 166 H and I Flow cytometry analysis of strain M1_SF370 (H) and the deletion strain M1_SF370Δ128 (I) with T-typing antisera pool T.

[0283] FIG. 167: Chart describing the number and type of sortase sequences identified within GAS AIs.

[0284] FIG. 168 A: Immunogold-electronmicroscopy of L. lactis lacking an expression construct for GBS AI-1 using anti-GBS 80 antibodies.

[0285] FIG. 168 B and C: Immunogold-electronmicroscopy detects GBS 80 in oligomeric (pilus) structures on surface of L. lactis transformed to express GBS AI-1

[0286] FIG. 169: FACS analysis detects expression of GBS 80 and GBS 104 on the surface of L. lactis transformed to express GBS AI-1.

[0287] FIG. 170: Phase contrast microscopy and immuno-electronmicroscopy shows that expression of GBS AI-1 in L. lactis induces L. lactis aggregation.

[0288] FIG. 171: Purification of GBS pili from L. lactis transformed to express GBS AI-1.

[0289] FIG. 172: Schematic depiction of GAS M6 (AI-1), M1 (AI-2), and M12 (AI-4) adhesin islands and portions of the adhesin islands inserted in the pAM401 construct for expression in L. lactis.

[0290] FIG. 173 A-C: Western blot analysis showing assembly of GAS pili in L. lactis expressing GAS AI-2 (M1) (A), GAS AI-4 (M12) (B), and GAS AI-1(M6) (C).

[0291] FIG. 174: FACS analysis of GAS serotype M6 for M6_Spy0157 surface expression.

[0292] FIG. 175: FACS analysis of GAS serotype M12 for 19224139 surface expression.

[0293] FIG. 176 A-E: Immunogold electron microscopy using antibodies against M6_Spy0160 detects pili on the surface of M6 strain 2724.

[0294] FIG. 176 F: Immunogold electron microscopy using antibodies against M6_Spy0159 detects M6_Spy0159 surface expression on M6 strain 2724.

[0295] FIG. 177 A-C: Western blot analysis of M1 strain SF370 GAS bacteria individually deleted for M1_{—}130, SrtC1, or M1_{—}128 using anti-M1_{—}130 serum (A), anti-M1_{—}128 serum (B), and anti-M1_{—}126 serum (C).

[0296] FIG. 178 A-C: Immunogold electron microscopy using antibodies against M1_{—}128 to detect surface expression on wildtype strain SF370 bacteria (A), M1_{—}128 deleted SF370 bacteria (B), and SrtC1 deleted SF370 bacteria (C).

[0297] FIG. 179 A-C: FACS analysis to detect expression of M1_{—}1126 (A), M1_{—}128 (B), and M1_{—}130 (C) on the surface of wildtype SF370 GAS bacteria.

[0298] FIG. 179 D-F: FACS analysis to detect expression of M1_{—}126 (D), M1_{—}128 (E), and M1_{—}130 (F) on the surface of M1_{—}128 deleted SF370 GAS bacteria.

[0299] FIG. 179 G-I: FACS analysis to detect expression of M1_{—}126 (G), M1_{—}128 (H), and M1_{—}130 (I) on the surface of SrtC1 deleted SF370 GAS bacteria.

[0300] FIG. 180 A and B: FACS analysis of wildtype (A) and LepA deletion mutant (B) strains of SF370 bacteria for M1 surface expression.

[0301] FIG. 181: Western blot analysis detects high molecular weight polymers in S. pneumoniae TIGR4 using anti-RrgB antisera.

[0302] FIG. 182: Detection of high molecular weight polymers in S. pnuemoniae rlrA positive strains.

[0303] FIG. 183: Detection of high molecular weight polymers in S. pneumoniae TIGR4 by silver staining and Western blot analysis using anti-RrgB antisera.

[0304] FIG. 184: Deletion of S. pneumoniae TIGR4 adhesin island sequences interferes with the ability of S. pneumoniae to adhere to A549 alveolar cells.

[0305] FIG. 185: Negative staining of S. pneumoniae strain TIGR4 showing abundant pili on the bacterial surface.

[0306] FIG. 186: Negative staining of strain TIGR4 deleted for rrgA-srtD adhesin island sequences showing no pili on the bacterial surface

[0307] FIG. 187: Negative staining of the TIGR4 mgrA mutant showing abundant pili on the bacterial surface.

[0308] FIG. 188: Negative staining of the negative control TIGR4 mgrA mutant deleted for adhesin island sequences rrgA-srtD showing no pili on the bacterial surface.

[0309] FIG. 189: Immuno-gold labelling of S. pneumoniae strain TIGR4 grown on blood agar solid medium using α-RrgB (5 nm) and α-RrgC (10 nm). Bar represents 200 nm.

[0310] FIG. 190 A and B: Detection of expression and purification of S. pneumoniae RrgA protein by SDS-PAGE (A) and Western blot analysis (B).

[0311] FIG. 191: Detection of RrgB by antibodies produced in mice.

[0312] FIG. 192: Detection of RrgC by antibodies produced in mice.

[0313] FIG. 193: Purification of S. pneumoniae TIGR 4 pili by a cultivation and digestion method and detection of the purified TIGR4 pili.

[0314] FIG. 194: Purification of S. pneumoniae TIGR 4 pili by a sucrose gradient centrifugation method and detection of the purified TIGR4 pili.

[0315] FIG. 195: Purification of S. pneumoniae TIGR 4 pili by a gel filtration method and detection of the purified TIGR4 pili.

[0316] FIG. 196: Alignment of full length S. pneumoniae adhesin island sequences from ten S. pneumoniae strains.

[0317] FIG. 197 A: Schematic of GBS AI-1 coding sequences.

[0318] FIG. 197 B: Nucleotide sequence of intergenic region between AraC and GBS 80 (SEQ ID NO: 273.

[0319] FIG. 197 C: FACS analysis results for GBS 80 expression in GBS strains having different length polyA tracts in the intergenic region between AraC and GBS 80.

[0320] FIG. 198: Table comparing the percent identity of surface proteins encoded by a serotype M6 (harbouring a GAS AI-1) adhesin island relative to other GAS serotypes harbouring an adhesin island.

[0321] FIG. 199: Table comparing the percent identity of surface proteins encoded by a serotype M1 (harbouring a GAS AI-2) adhesin island relative to other GAS serotypes harbouring an adhesin island.

[0322] FIG. 200: Table comparing the percent identity of surface proteins encoded by serotypes M3, M18, M5, and M49 (harbouring GAS AI-3) adhesin islands relative to other GAS serotypes harbouring an adhesin island.

[0323] FIG. 201: Table comparing the percent identity of surface proteins encoded by a serotype M12 (harbouring a GAS AI-1) adhesin island-relative to other GAS serotypes harbouring an adhesin island.

[0324] FIG. 202: GBS 80 recombinant protein does not bind to epithelial cells.

[0325] FIG. 203: Deletion of GBS 80 protein does not affect the ability of GBS to adhere and invade ME180 cervical epithelial cells.

[0326] FIG. 204: GBS 80 binds to extracellular matrix proteins.

[0327] FIG. 205: Deletion of GBS 104 protein, but not GBS 80, reduces the capacity of GBS to invade J774 macrophage-like cells

[0328] FIG. 206: GBS 104 knockout mutant strains of bacteria translocate through an epithelial monolayer less efficiently that the isogenic wild type strain.

[0329] FIG. 207: GBS 80 knockout mutant strains of bacteria partially lose the ability to translocate through an epithelial monolayer.

[0330] FIG. 208: GBS adherence to HUVEC endothelial cells.

[0331] FIG. 209: Strain growth rate of wildtype, GBS 80-deleted, or GBS 104 deleted COH1 GBS.

[0332] FIG. 210: Binding of recombinant GBS 104 protein to epithelial cells by FACS analysis.

[0333] FIG. 211: Deletion of GBS 104 protein in the GBS strain COH1 reduces the ability of GBS to adhere to ME180 cervical epithelial cells.

[0334] FIG. 212: COH1 strain GBS overexpressing GBS 80 protein has an impaired capacity to translocate through an epithelial monolayer.

[0335] FIG. 213: Scanning electron microscopy shows that overexpression of GBS 80 protein on COH1 strain GBS enhances the capacity of the COH1 bacteria to form microcolonies on epithelial cells.

[0336] FIG. 214: Confocal imaging shows that overexpression of GBS 80 proteins on COH1 strain GBS enhances the capacity of the COH1 bacteria to form microcolonies on epithelial cells.

[0337] FIG. 215: Detection of GBS 59 on the surface of GBS strain 515 by immuno-electron microscopy.

[0338] FIG. 216: Detection of GBS 67 on the surface of GBS strain 515 by immuno-electron microscopy.

[0339] FIG. 217: GBS 67 binds to fibronectin.

[0340] FIG. 218: Western blot analysis shows that deletion of both GBS AI-2 sortase genes abolishes assembly of the pilus.

[0341] FIG. 219: FACS analysis shows that deletion of both GBS AI-2 sortase genes abolishes assembly of the pilus.

[0342] FIG. 220 A-C: Western blot analysis shows that GBS 59, GBS 67, and GBS 150 form high molecular weight complexes.

[0343] FIG. 221 A-C: Western blot analysis shows that GBS 59 is required for polymer formation of GBS 67 and GBS 150.

[0344] FIG. 222: FACS analysis shows that GBS 59 is required for surface exposure of GBS 67.

[0345] FIG. 223: Summary Western blots for detection of GBS 59, GBS 67, or GBS 150 in GBS 515 and GBS 515 mutant strain.

[0346] FIG. 224: Description of GBS 59 Allelic variants.

[0347] FIG. 225: GBS 59 is opsonic only against a strain of GBS expressing a homologous GBS 59.

[0348] FIG. 226 A and B: Results of FACS analysis for surface expression of GBS 59 using antibodies specific for different GBS 59 isoforms.

[0349] FIG. 227 A and B: Results of FACS analysis for surface expression of GBS 80, GBS 104, GBS 322, GBS 67, and GBS 59 on 41 various strains of GBS bacteria.

[0350] FIG. 228: Results of FACS analysis for surface expression of GBS 80, GBS 104, GBS 322, GBS 67, and GBS 59 on 41 strains of GBS bacteria obtained from the CDC.

[0351] FIG. 229: Expected immunogenicity coverage of different combinations of GBS 80, GBS 104, GBS 322, GBS 67, and GBS 59 across strains of GBS bacteria.

[0352] FIG. 230: GBS 59 opsonophagocytic activity is comparable to that of a mixture of GBS 80, GBS 104, GBS 322 and GBS 67.

[0353] FIG. 231 A-C: Schematic presentation of example hybrid GBS AIs.

[0354] FIG. 232: Schematic presentation of an example hybrid GBS AI.

[0355] FIG. 233 A and B: Western blot and FACS analysis detect expression of GBS 80 and GBS 67 on the surface of L. lactis transformed with a hybrid GBS AI.

[0356] FIG. 234 A-E Hybrid GBS AI cloning strategy.

[0357] FIG. 235: High magnification of S. pneumoniae strain TIGR4 pili double labeled with α-RrgB (5 nm) and α-RrgC (10 nm). Bar represents 100 nm.

[0358] FIG. 236: Immuno-gold labeling of the S. pneumoniae TIGR4 rrgA-srtD deletion mutant with no visible pili on the surface detectable by α-RrgB- and α-RrgC. Bar represents 200 nm.

[0359] FIG. 237: Variability in GBS 67 amino acid sequences between strains 2603 and H36B.

[0360] FIG. 238: Strain variability in GBS 67 amino acid sequences of allele I (2603).

[0361] FIG. 239: Stran variability in GBS 67 amino acid sequence of allele II (H36B).

### BRIEF DESCRIPTION OF THE TABLES

[0362] TABLE 1: Active Maternal Immunization Assay for fragments of GBS 80

[0363] TABLE 2: Passive Maternal Immunization Assay for fragments of GBS 80

[0364] TABLE 3: Lethal dose 50% of AI-1 mutants from GBS strain isolate 2603.

[0365] TABLE 4: GAS AI-1 sequences from M6 isolate (MGAS10394).

[0366] TABLE 5: GAS AI-2 sequences from M1 isolate (SF370).

[0367] TABLE 6: GAS AI-3 sequences from M3 isolate (MGAS315).

[0368] TABLE 7: GAS AI-3 sequences from M3 isolate (SSI-1).

[0369] TABLE 8: GAS AI-3 sequences from M18 isolate (MGAS8232).

[0370] TABLE 9: S. pneumoniae AI sequences from TIGR4 sequence.

[0371] TABLE 10: GAS AI-3 sequences from M5 isolate (Manfredo).

[0372] TABLE 11: GAS AI-4 sequences from M12 isolate (A735).

[0373] TABLE 12: Conservation of GBS 80 and GBS 104 amino acid sequences.

[0374] TABLE 13: Conservation of GBS 322 and GBS 276 amino acid sequences.

[0375] TABLE 14: Active maternal immunization assay for a combination of fragments from GBS 322, GBS 80, GBS 104, and GBS 67.

[0376] TABLE 15: Antigen surface exposure of GBS 80, GBS 322, GBS 104, and GBS 67.

[0377] TABLE 16: Active maternal immunization assay for each of GBS 80 and GBS 322 antigens.

[0378] TABLE 17: Active maternal immunization assay for GBS 59.

[0379] TABLE 18: Summary of FACS values for surface expression of spyM6_{—}0159.

[0380] TABLE 19: Summary of FACS values for surface expression of spyM6_{—}0160.

[0381] TABLE 20: Summary of FACS values for surface expression of GAS 15.

[0382] TABLE 21: Summary of FACS values for surface expression of GAS 16.

[0383] TABLE 22: Summary of FACS values for surface expression of GAS 16 using a second antisera.

[0384] TABLE 23: Summary of FACS values for surface expression of GAS 18.

[0385] TABLE 24: Summary of FACS values for surface expression of GAS 18 using a second antisera.

[0386] TABLE 25: Summary of FACS values for surface expression of SpyM3_{—}0098.

[0387] TABLE 26: Summary of FACS values for surface expression of SpyM3_{—}0100.

[0388] TABLE 27: Summary of FACS values for surface expression of SpyM3_{—}0102 in M3 serotypes.

[0389] TABLE 28: Summary of FACS values for surface expression of SpyM3_{—}0102 in M6 serotypes.

[0390] TABLE 29: Summary of FACS values for surface expression of SpyM3_{—}0104 in M3 serotypes.

[0391] TABLE 30: Summary of FACS values for surface expression of SpyM3_{—}0104 in an M12 serotype.

[0392] TABLE 31: Summary of FACS values for surface expression of SPs_{—}0106 in M3 serotypes.

[0393] TABLE 32: Summary of FACS values for surface expression of SPs_{—}0106 in an M12 serotype.

[0394] TABLE 33: Summary of FACS values for surface expression of 19224134 in an M12 serotype.

[0395] TABLE 34: Summary of FACS values for surface expression of 19224134 in M6 serotypes.

[0396] TABLE 35: Summary of FACS values for surface expression of 19224135 in an M12 serotype.

[0397] TABLE 36: Summary of FACS values for surface expression of 19224137 in an M12 serotype.

[0398] TABLE 37: Summary of FACS values for surface expression of 19224141 in an M12 serotype.

[0399] TABLE 38: S. pneumoniae strain 670 μl sequences.

[0400] TABLE 39: Pecent identity comparison of S. pneumoniae strains AI sequences.

[0401] TABLE 40: FACS analysis of L. lactis and GBS bacteria strains expressing GBS AI-1.

[0402] TABLE 41: Sequences of primers used to amplify AI locus.

[0403] TABLE 42: Conservation of amino acid sequences encoded by the S. pneumoniae AI locus.

[0404] TABLE 43: Protection of Mice Immunized with L. lactis expressing GBS AI-1.

[0405] TABLE 44: GAS AI-3 sequences from M49 isolate (591).

[0406] TABLE 45: Comparison of Sequences Between the Four GAS AIs.

[0407] TABLE 46: Antibody Responses against GBS 80 in Serum of Mice Immunized with L. lactis Expressing GBS AI-1

[0408] TABLE 47: Anti-GBS 80 IgA Antibodies Detected in Mouse Tissues Following Immunization with L. lactis Expressing GBS AI-1

[0409] TABLE 48: GBS 67 Protects Mice in an Immunization Assay

[0410] TABLE 49: Exposure Levels of GBS 80, GBS 104, GBS 67, GBS 322, and GBS 59 on GBS Strains

[0411] TABLE 50: High Levels of Surface Protein Expression on GBS Serotypes

[0412] TABLE 51: Further Protection of Mice Immunized with L. lactis expressing GBS AI-1

### DETAILED DESCRIPTION OF THE INVENTION

[0413] The practice of the present invention will employ, unless otherwise indicated, conventional methods of chemistry, biochemistry, molecular biology, immunology and pharmacology, within the skill of the art. Such techniques are explained fully in the literature. See, e.g., Remington's Pharmaceutical Sciences, Mack Publishing Company, Easton, Pa., 19th Edition (1995); Methods In Enzymology (S. Colowick and N. Kaplan, eds., Academic Press, Inc.); and Handbook of Experimental Immunology, Vols. I-IV (D. M. Weir and C. C. Blackwell, eds., 1986, Blackwell Scientific Publications); Sambrook, et al., Molecular Cloning: A Laboratory Manual (2nd Edition, 1989); Handbook of Surface and Colloidal Chemistry (Birdi, K. S. ed., CRC Press, 1997); Short Protocols in Molecular Biology, 4th ed. (Ausubel et al. eds., 1999, John Wiley & Sons); Molecular Biology Techniques: An Intensive Laboratory Course, (Ream et al., eds., 1998, Academic Press); PCR (Introduction to Biotechniques Series), 2nd ed. (Newton & Graham eds., 1997, Springer Verlag); Peters and Dalrymple, Fields Virology (2d ed), Fields et al. (eds.), B. N. Raven Press, New York, N.Y.

[0414] All publications, patents and patent applications cited herein, are hereby incorporated by reference in their entireties.

[0415] As used herein, an “Adhesin Island” or “AI” refers to a series of open reading frames within a bacterial genome, such as the genome for Group A or Group B Streptococcus or other gram positive bacteria, that encodes for a collection of surface proteins and sortases. An Adhesin Island may encode for amino acid sequences comprising at least one surface protein. The Adhesin Island may encode at least one surface protein. Alternatively, an Adhesin Island may encode for at least two surface proteins and at least one sortase. Preferably, an Adhesin Island encodes for at least three surface proteins and at least two sortases. One or more of the surface proteins may include an LPXTG motif (such as LPXTG (SEQ ID NO: 122)) or other sortase substrate motif. One or more AI surface proteins may participate in the formation of a pilus structure on the surface of the gram positive bacteria.

[0416] Adhesin Islands of the invention preferably include a divergently transcribed transcriptional regulator (i.e., the transcriptional regulator is located near or adjacent to the AI protein open reading frames, but it transcribed in the opposite direction). The transcriptional regulator may regulate the expression of the AI operon.

GBS Adhesin Island 1

[0417] As discussed above, Applicants have identified a new adhesin island, “Adhesin Island 1”, “AI-1”, or “GBS AI-1”, within the genomes of several Group B Streptococcus serotypes and isolates. AI-1 comprises a series of approximately five open reading frames encoding for a collection of amino acid sequences comprising surface proteins and sortases (“AI-1 proteins”). Specifically, AI-1 includes open reading frames encoding for two or more (i.e., 2, 3, 4 or 5) of GBS 80, GBS 104, GBS 52, SAG0647 and SAG0648. One or more of the AI-1 open reading frame polynucleotide sequences may be replaced by a polynucleotide sequence coding for a fragment of the replaced ORF. Alternatively, one or more of the AI-1 open reading frames may be replaced by a sequence having sequence homology to the replaced ORF.

[0418] A schematic of AI-1 is presented in FIG. 1. AI-1 typically resides on an approximately 16.1 kb transposon-like element frequently inserted into the open reading frame for trmA. One or more of the AI-1 surface protein sequences typically include an LPXTG motif (such as LPXTG (SEQ ID NO: 122)) motif or other sortase substrate motif. The AI surface proteins of the invention may affect the ability of the GBS bacteria to adhere to and invade epithelial cells. AI surface proteins may also affect the ability of GBS to translocate through an epithelial cell layer. Preferably, one or more AI surface proteins are capable of binding to or otherwise associating with an epithelial cell surface. AI surface proteins may also be able to bind to or associate with fibrinogen, fibronectin, or collagen.

[0419] The AI-1 sortase proteins are predicted to be involved in the secretion and anchoring of the LPXTG containing surface proteins. AI-1 may encode for at least one surface protein. Alternatively, AI-1 may encode for at least two surface exposed proteins and at least one sortase. Preferably, AI-1 encodes for at least three surface exposed proteins and at least two sortases. The AI-1 protein preferably includes GBS 80 or a fragment thereof or a sequence having sequence identity thereto.

[0420] As used herein, an LPXTG motif represents an amino acid sequence comprising at least five amino acid residues. Preferably, the motif includes a leucine (L) in the first amino acid position, a proline (P) in the second amino acid position, a threonine (T) in the fourth amino acid position and a glycine (G) in the fifth amino acid position. The third position, represented by X, may be occupied by any amino acid residue. Preferably, the X is occupied by lysine (K), Glutamate (E), Asparagine (N), Glutamine (Q) or Alanine (A). Preferably, the X position is occupied by lysine (K). In some embodiments, one of the assigned LPXTG amino acid positions is replaced with another amino acid. Preferably, such replacements comprise conservative amino acid replacements, meaning that the replaced amino acid residue has similar physiological properties to the removed amino acid residue. Genetically encoded amino acids may be divided into four families based on physiological properties: (1) acidic (asparatate and glutamate), (2) basic (lysine, arginine, histitidine), (3) non-polar (alanine, valine, leucine, isoleucine, proline, phenylalanine, methionine, tryptophane) and (4) uncharged polar (glycine, asparagines, glutamine, cysteine, serine, threonine, and tyrosine). Phenylalanine, tryptophan and tyrosine are sometimes classified jointly as aromatic amino acids. For example, it is reasonably predictable that an isolated replacement of a leucine with an isoleucine or valine, an asparate with a glutamate, a threonine with a serine, or a similar conservative replacement of an amino acid with a structurally related amino acid will not have a major effect on the biological activity.

[0421] The first amino acid position of the LPXTG motif may be replaced with another amino acid residue. Preferably, the first amino acid residue (leucine) is replaced with an alanine (A), valine (V), isoleucine (I), proline (P), phenylalanine (F), methionine (M), glutamic acid (E), glutamine (Q), or tryptophan (Y) residue. In one preferred embodiment, the first amino acid residue is replaced with an isoleucine (I).

[0422] The second amino acid residue of the LPXTG motif may be replaced with another amino acid residue. Preferably, the second amino acid residue praline (P) is replaced with a valine (V) residue.

[0423] The fourth amino acid residue of the LPXTG motif may be replaced with another amino acid residue. Preferably, the fourth amino acid residue (threonine) is replaced with a serine (S) or an alanine (A).

[0424] In general, an LPXTG motif may be represented by the amino acid sequence XXXXG, in which X at amino acid position 1 is an L, a V, an E, an I, an F, or a Q; X at amino acid position 2 is a P if X at amino acid position 1 is an L, an I, or an F; X at amino acid position 2 is a V if X at amino acid position 1 is a E or a Q; X at amino acid position 2 is a V or a P if X at amino acid position 1 is a V; X at amino acid position 3 is any amino acid residue; X at amino acid position 4 is a T if X at amino acid position 1 is a V, E, I, F, or Q; and X at amino acid position 4 is a T, S, or A if X at amino acid position 1 is an L.

[0425] Generally, the LPXTG motif of a GBS AI protein may be represented by the amino acid sequence XPXTG, in which X at amino acid position 1 is L, I, or F, and X at amino acid position 3 is any amino acid residue. Specific examples of LPXTG motifs in GBS AI proteins may include LPXTG (SEQ ID NO: 122) or IPXTG (SEQ ID NO: 133).

[0426] As discussed further below, the threonine in the fourth amino acid position of the LPXTG motif may be involved in the formation of a bond between the LPXTG containing protein and a cell wall precursor. Accordingly, in preferred LPXTG motifs, the threonine in the fourth amino acid position is not replaced with another amino acid or, if the threonine is replaced, the replacement amino acid is preferably a conservative amino acid replacement, such as serine.

[0427] Instead of an LPXTG motif, the AI surface proteins of the invention may contain alternative sortase substrate motifs such as NPQTN (SEQ ID NO: 142), NPKTN (SEQ ID NO: 168), NPQTG (SEQ ID NO: 169), NPKTG (SEQ ID NO: 170), XPXTGG (SEQ ID NO: 143), LPXTAX (SEQ ID NO: 144), or LAXTGX (SEQ ID NO: 145). (Similar conservative amino acid substitutions can also be made to these membrane motifs).

[0428] The AI surface proteins may be covalently attached to the bacterial cell wall by membrane-associated transpeptidases, such as an AI sortase. The sortase may function to cleave the surface protein, preferably between the threonine and glycine residues of an LPXTG motif. The sortase may then assist in the formation of an amide link between the threonine carboxyl group and a cell wall precursor such as lipid II. The precursor can then be incorporated into the peptidoglycan via the transglycoslylation and transpeptidation reactions of bacterial wall synthesis. See Comfort et al., Infection & Immunity (2004) 72(5): 2710-2722.

[0429] The AI surface proteins may be polymerized into pili by sortase-catalysed transpeptidation. (See FIG. 44.) Cleavage of AI surface proteins by sortase between the threonine and glycine residues of an LPXTG motif yields a thioester-linked acyl intermediate of sortase. Many AI surface proteins include a pilin motif amino acid sequence which interacts with the sortase and LPXTG amino acid sequence. The first lysine residue in a pilin motif can serve as an amino group acceptor of the cleaved LPXTG motif and thereby provide a covalent linkage between AI subunits to form pili. For example, the pilin motif can make a nucleophilic attack on the acyl enzyme providing a covalent linkage between AI subunits to form pili and regenerate the sortase enzyme. Examples of pilin motifs may include ((YPKN(X₁₀)K; SEQ ID NO: 146), (YPKN(X₉)K; SEQ ID NO: 147), (YPK(X₇)K; SEQ ID NO: 148), (YPK(X₁₁)K; SEQ ID NO: 149), or (PKN(X₉)K; SEQ ID NO: 150)). Preferably, the AI surface proteins of the invention include a pilin motif amino acid sequence.

[0430] Typically, AI surface proteins of the invention will contain an N-terminal leader or secretion signal to facilitate translocation of the surface protein across the bacterial membrane.

[0431] Group B Streptococci are known to colonize the urinary tract, the lower gastrointestinal tract and the upper respiratory tract in humans. Electron micrograph images of GBS infection of a cervical epithelial cell line (ME180) are presented in FIG. 25. As shown in these images, the bacteria closely associate with tight junctions between the cells and appear to cross the monolayer by a paracellular route. Similar paracellular invasion of ME180 cells is also shown in the contrast images in FIG. 26. The AI surface proteins of the invention may effect the ability of the GBS bacteria to adhere to and invade epithelial cells. AI surface proteins may also affect the ability of GBS to translocate through an epithelial cell layer. Preferably, one or more AI surface proteins are capable of binding to or otherwise associating with an epithelial cell surface.

[0432] Applicants have discovered that AI-1 surface protein GBS 104 can bind epithelial cells such as ME180 human cervical cells, A549 human lung cells and Caco2 human intestinal cells (See FIGS. 29 and 210). Further, deletion of the GBS 104 sequence in a GBS strain reduces the capacity of GBS to adhere to ME180 cervical epithelial cells. (See FIGS. 30 and 211). Deletion of GBS 104 also reduces the capacity of GBS to invade J774 macrophage-like cells. (See FIGS. 32 and 205). Deletion of GBS 104 also causes GBS to translocate through epithelial monolayers less efficiently. See FIG. 206. GBS 104 protein therefore appears to bind to ME180 epithelial cells and to have a role in adhesion to epithelial cells and macrophage cell lines.

[0433] Similar to the GBS bacteria that are deletion mutants for GBS 104, GBS 80 knockout mutant strains also partially lose the ability to translocate through an epithelial monolayer. See FIG. 207. Deletion of either GBS 80 or GBS 104 in COH1 cells diminishes adherence to HUVEC endothelial cells. See FIG. 208. Deletion of GBS 80 or GBS 104 in COH1 does not, however, affect growth of COH1 either with ME180 cells or in incubation medium (IM). See FIG. 209. Both GBS 80 and GBS 104, therefore, appear to be involved in translocation of GBS through epithelial cells.

[0434] GBS 80 does not appear to bind to epithelial cells. Incubation of epithelial cells in the presence of GBS 80 protein followed by FACS analysis using an anti-GBS 80 polyclonal antibody did not detect GBS 80 binding to the epithelial cells. See FIG. 202. Furthermore, deletion of GBS 80 protein does not affect the ability of GBS to adhere and invade ME180 cervical epithelial cells. See FIG. 203

[0435] Preferably, one or more of the surface proteins may bind to one or more extracellular matrix (ECM) binding proteins, such as fibrinogen, fibronectin, or collagen. As shown in FIGS. 5 and 204, and Example 1, GBS 80, one of the AI-1 surface proteins, can bind to the extracellular matrix binding proteins fibronectin and fibrinogen. While GBS 80 protein apparently does not bind to certain epithelial cells or affect the capacity of a GBS bacteria to adhere to or invade cervical epithelial cells (See FIGS. 27 and 28), removal of GBS 80 from a wild type strain decreases the ability of that strain to translocate through an epithelial cell layer (see FIG. 31).

[0436] GBS 80 may also be involved in formation of biofilms. COH1 bacteria overexpressing GBS 80 protein have an impaired ability to translocate through an epithelial monolayer. See FIG. 212. These COH1 bacteria overexpressing GBS 80 form microcolonies on epithelial cells. See FIGS. 213 and 214. These microcolonies may be the initiation of biofilm development.

[0437] AI Surface proteins may also demonstrate functional homology to previously identified adhesion proteins or extracellular matrix (ECM) binding proteins. For example, GBS 80, a surface protein in AI-1, exhibits some functional homology to FimA, a major fimbrial subunit of a Gram positive bacteria A. naeslundii. FimA is thought to be involved in binding salivary proteins and may be a component in a fimbrae on the surface of A. naeslundii. See Yeung et al. (1997) Infection & Immunity 65:2629-2639; Yeunge et al (1998) J. Bacteriol 66:1482-1491; Yeung et al. (1988) J. Bacteriol 170:3803-3809; and Li et al. (2001) Infection & Immunity 69:7224-7233.

[0438] A similar functional homology has also been identified between GBS 80 and proteins involved in pili formation in the Gram positive bacteria Corynebacterium diphtheriae (SpaA, SpaD, and SpaH). See, Ton-That et al. (2003) Molecular Microbiology 50(4):1429-1438 and Ton-That et al. (2004) Molecular Microbiology 53(1):251-261. The C. diphtheriae proteins all included a pilin motif of WxxxVxVYPK (SEQ ID NO: 151; where x indicates a varying amino acid residue). The lysine (K) residue is particularly conserved in the C. diphtheriae pilus proteins and is thought to be involved in sortase catalized oligomerization of the subunits involved in the C. diphtheriae pilus structure. (The C. diphtheriae pilin subunit SpaA is thought to occur by sortase-catalyzed amide bond cross-linking of adjacent pilin subunits. As the thioester-linked acyl intermediate of sortase requires nucleophilic attack for release, the conserved lysine within the SpaA pilin motif might function as an amino group acceptor of cleaved sorting signals, thereby providing for covalent linkages of the C. diphtheria pilin subunits. See FIG. 6(d) of Ton-That et al., Molecular Microbiology (2003) 50(4): 1429-1438.)

[0439] In addition, an “E box” comprising a conserved glutamic acid residue has also been identified in the C. diphtheria pilin associated proteins as important in C. diphtheria pilin assembly. The E box motif generally comprises YxLxETxAPxGY (SEQ ID NO: 152; where x indicates a varying amino acid residue). In particular, the conserved glutamic acid residue within the E box is thought necessary for C. diphtheria pilus formation.

[0440] Preferably, the AI-1 polypeptides of the immunogenic compositions comprise an E box motif. Some examples of E box motifs in the AI-1 polypeptides may include the amino acid sequences YxLxExxxxxGY (SEQ ID NO: 153), YxLxExxxPxGY (SEQ ID NO: 154), or YxLxETxAPxGY (SEQ ID NO: 152). Specifically, the E box motif of the polypeptides may comprise the amino acid sequences YKLKETKAPEGY (SEQ ID NO: 155), YVLKEIETQSGY (SEQ ID NO: 156), or YKLYEISSPDGY (SEQ ID NO: 157).

[0441] As discussed in more detail below, a pilin motif containing a conserved lysine residue and an E box motif containing a conserved glutamic acid residue have both been identified in GBS 80.

[0442] While previous publications have speculated that pilus-like structures might be formed on the surface of streptococci, (see, e.g., Ton-That et al., Molecular Microbiology (2003) 50(4): 1429-1438), these structures have not been previously visible in negative stain (non-specific) electron micrographs, throwing such speculations into doubt. For example, FIG. 34 presents electron micrographs of GBS serotype III, strain isolate COH1 with a plasmid insert to facilitate the overexpression of GBS 80. This EM photo was produced with a standard negative stain—no pilus structures are distinguishable. In addition, the use of such AI surface proteins in immunogenic compositions for the treatment or prevention of infection against a Gram positive bacteria has not been previously described.

[0443] Surprisingly, Applicants have now identified the presence of GBS 80 in surface exposed pilus formations visible in electron micrographs. These structures are only visible when the electron micrographs are specifically stained against an AI surface protein such as GBS 80. Examples of these electron micrographs are shown in FIGS. 11, 16 and 17, which reveal the presence of pilus structures in wild type COH1 Streptococcus agalactiae. Other examples of these electron micrographs are shown in FIG. 49, which reveals that GBS 80 is associated with pili in a wild type clinical isolate of S. agalactiae, JM9030013. (See FIG. 49.)

[0444] Applicants have also constructed mutant GBS strains containing a plasmid comprising the GBS 80 sequence resulting in the overexpression of GBS 80 within this mutant. The electron micrographs of FIGS. 13-15 are also stained against GBS 80 and reveal long, oligomeric structures containing GBS 80 which appear to cover portions of the surface of the bacteria and stretch far out into the supernatant.

[0445] In some instances, the formation of pili structures on GBS appears to be correlated to surface expression of GBS 80. FIG. 61 provides FAC analysis of GBS 80 surface levels on bacterial strains COH1 and JM9130013 using an anti-GBS 80 antisera. Immunogold electron microscopy of the COH1 and JM9130013 bacteria using anti-GBS 80 antisera demonstrates that JM9130013 bacteria, which have higher values for GBS 80 surface expression, also form longer pili structures.

[0446] The surface exposure of GBS 80 on GBS is generally not capsule-dependent. FIG. 62 provides FACS analysis of capsulated and uncapsulated GBS analyzed with anti-GBS 80 and anti-GBS 322 antibodies. Surface exposure of GBS 80, unlike GBS 322, is not capsule dependent.

[0447] An Adhesin Island surface protein, such as GBS 80 appears to be required for pili formation, as well as an Adhesin Island sortase. Pili are formed in Coh1 bacterial clones that overexpress GBS 80, but lack GBS 104, or one of the AI-1 sortases sag0647 or sag0648. However, pili are not formed in Coh1 bacterial clones that overexpress GBS 80 and lack both sag0647 and sag0648. Thus, for example, it appears that at least GBS 80 and a sortase, sag0647 or sag0648, may be necessary for pili formation. (See FIG. 48.) Overexpression of GBS 80 in GBS strain 515, which lacks an AI-1, also assembles GBS 80 into pili. GBS strain 515 contains an AI-2, and thus AI-2 sortases. The AI-2 sortases in GBS strain 515 apparently polymerize GBS 80 into pili. (See FIG. 42.) Overexpression of GBS 80 in GBS strain 515 cell knocked out for GBS 67 expression also apparently polymerizes GBS 80 into pili. (See FIG. 72.)

[0448] While GBS 80 appears to be required for GBS AI-1 pili formation, GBS 104 and sortase SAG0648 appears to be important for efficent AI-1 pili assembly. For example, high-molecular structures are not assembled in isogenic COH1 strains which lack expression of GBS 80 due to gene disruption and are less efficiently assembled in isogenic COH1 strains which lack the expression of GBS 104 (see FIG. 41). This GBS strain comprises high molecular weight pili structures composed of covalently linked GBS 80 and GBS 104 subunits. In addition, deleting SAG0648 in COH1 bacteria interferes with assembly of some of the high molecular weight pili structures. Thus, indicating that SAG0648 plays a role in assembly of these pilin species. (See FIG. 41).

[0449] EM photos confirm the involvement of AI surface protein GBS 104 within the hyperoligomeric structures of a GBS strain adapted for increased GBS 80 expression. (See FIGS. 34-41 and Example 6). In a wild type serotype VIII GBS strain, strain JM9030013, IEM identifies GBS 104 as forming clusters on the bacterial surface. (See FIG. 50.)

[0450] GBS 52 also appears to be a component of the GBS pili. Immunoblots using an anti-GBS 80 antisera on total cell extracts of Coh1 and a GBS 52 null mutant Coh1 reveal a shift in detected proteins in the Coh1 wild type strain relative to the GBS 52 null mutant Coh1 strain. The shifted proteins were also detected in the wild type Coh1 bacteria with an anti-GBS 52 antisera, indicating that the GBS 52 may be present in the pilus. (See FIG. 45.)

[0451] In one embodiment, the invention includes a composition comprising oligomeric, pilus-like structures comprising an AI surface protein such as GBS 80. The oligomeric, pilus-like structure may comprise numerous units of AI surface protein. Preferably, the oligomeric, pilus-like structures comprise two or more AI surface proteins. Still more preferably, the oligomeric, pilus-like structure comprises a hyper-oligomeric pilus-like structure comprising at least two (e.g., 2, 3, 4, 5, 6, 7, 8, 9, 10, 11, 12, 13, 14, 15, 20, 25, 30, 35, 40, 45, 50, 60, 70, 80, 90, 100, 120, 140, 150, 200 or more) oligomeric subunits, wherein each subunit comprises an AI surface protein or a fragment thereof. The oligomeric subunits may be covalently associated via a conserved lysine within a pilin motif. The oligomeric subunits may be covalently associated via an LPXTG motif, preferably, via the threonine amino acid residue.

[0452] AI surface proteins or fragments thereof to be incorporated into the oligomeric, pilus-like structures of the invention will preferably include one or both of a pilin motif comprising a conserved lysine residue and an E box motif comprising a conserved glutamic acid residue.

[0453] More than one AI surface protein may be present in the oligomeric, pilus-like structures of the invention. For example, GBS 80 and GBS 104 may be incorporated into an oligomeric structure. Alternatively, GBS 80 and GBS 52 may be incorporated into an oligomeric structure, or GBS 80, GBS 104 and GBS 52 may be incorporated into an oligomeric structure.

[0454] In another embodiment, the invention includes compositions comprising two or more AI surface proteins. The composition may include surface proteins from the same adhesin island. For example, the composition may include two or more GBS AI-1 surface proteins, such as GBS 80, GBS 104 and GBS 52. The surface proteins may be isolated from Gram positve bacteria or they may be produced recombinantly.

[0455] The oligomeric, pilus like structures may be used alone or in the combinations of the invention. In one embodiment, the invention comprises a GBS Adhesin Island protein in oligomeric form, preferably in a hyperoligomeric form. In one embodiment, the invention comprises a composition comprising one or more GBS Adhesin Island 1 (“AI-1”) proteins and one or more GBS Adhesin Island 2 (“AI-2”) proteins, wherein one or more of the Adhesin Island proteins is in the form of an oligomer, preferably in a hyperoligomeric form.

[0456] The oligomeric, pilus-like structures of the invention may be combined with one or more additional GBS proteins. In one embodiment, the oligomeric, pilus-like structures comprise one or more AI surface proteins in combination with a second GBS protein. The second GBS protein may be a known GBS antigen, such as GBS 322 (commonly referred to as “sip”) or GBS 276. Nucleotide and amino acid sequences of GBS 322 sequenced from serotype V isolated strain 2603 V/R are set forth in WO 02/35771 as SEQ ID 8539 and SEQ ID 8540 and in the present specification as SEQ ID NOs: 38 and 39. A particularly preferred GBS 322 polypeptide lacks the N-terminal signal peptide, amino acid residues 1-24. An example of a preferred GBS 322 polypeptide is a 407 amino acid fragment and is shown in SEQ ID NO: 40. Examples of preferred GBS 322 polypeptides are further described in PCTUS04/______, attorney docket number PP20665.002 filed Sep. 15, 2004, hereby incorporated by reference, published as WO 2005/002619.

[0457] Additional GBS proteins which may be combined with the GBS AI surface proteins of the invention are also described in WO 2005/002619. These GBS proteins include GBS 91, GBS 184, GBS 305, GBS 330, GBS 338, GBS 361, GBS 404, GBS 690, and GBS 691.

[0458] Additional GBS proteins which may be combined with the GBS AI surface proteins of the invention are described in WO 02/34771.

[0459] GBS polysaccharides which may be combined with the GBS AI surface proteins of the invention are described in WO 2004/041157. For example, the GBS AI surface proteins of the invention may be combined with a GBS polysaccharides selected from the group consisting of serotype Ia, Ib, Ia/c, II, III, IV, V, VI, VII and VIII.

[0460] The oligomeric, pilus-like structures may be isolated or purified from bacterial cultures in which the bacteria express an AI surface protein. The invention therefore includes a method for manufacturing an oligomeric AI surface antigen comprising culturing a GBS bacterium that expresses the oligomeric AI protein and isolating the expressed oligomeric AI protein from the GBS bacteria. The AI protein may be collected from secretions into the supernatant or it may be purified from the bacterial surface. The method may further comprise purification of the expressed AI protein. Preferably, the AI protein is in a hyperoligomeric form. Macromolecular structures associated with oligomeric pili are observed in the supernatant of cultured GBS strain Coh1. (See FIG. 46.) These pili are found in the supernatant at all growth phases of the cultured Coh1 bacteria. (See FIG. 47.)

[0461] The oligomeric, pilus-like structures may be isolated or purified from bacterial cultures overexpressing an AI surface protein. The invention therefore includes a method for manufacturing an oligomeric Adhesin Island surface antigen comprising culturing a GBS bacterium adapted for increased AI protein expression and isolation of the expressed oligomeric Adhesin Island protein from the GBS bacteria. The AI protein may be collected from secretions into the supernatant or it may be purified from the bacterial surface. The method may further comprise purification of the expressed Adhesin Island protein. Preferably, the Adhesin Island protein is in a hyperoligomeric form.

[0462] The GBS bacteria are preferably adapted to increase AI protein expression by at least two (e.g., 2, 3, 4, 5, 8, 10, 15, 20, 25, 30, 35, 40, 45, 50, 60, 70, 80, 90, 100, 125, 150 or 200) times wild type expression levels.

[0463] GBS bacteria may be adapted to increase AI protein expression by any means known in the art, including methods of increasing gene dosage and methods of gene upregulation. Such means include, for example, transformation of the GBS bacteria with a plasmid encoding the AI protein. The plasmid may include a strong promoter or it may include multiple copies of the sequence encoding the AI protein. Optionally, the sequence encoding the AI protein within the GBS bacterial genome may be deleted. Alternatively, or in addition, the promoter regulating the GBS Adhesin Island may be modified to increase expression.

[0464] GBS bacteria harbouring a GBS AI-1 may also be adapted to increase AI protein expression by altering the number adenosine nucleotides present at two sites in the intergenic region between AraC and GBS 80. See FIG. 197 A, which is a schematic showing the organization of GBS AI-1 and FIG. 197 B, which provides the sequence of the intergenic region between AraC and GBS 80 in the AI. The adenosine tracts which applicants have identified as influencing GBS 80 surface expression are at nucleotide positions 187 and 233 of the sequence shown in FIG. 197 B (SEQ ID NO: 273). Applicants determined the influence of these adenosine tracts on GBS 80 surface expression in strains of GBS bacteria harboring four adenosines at position 187 and six adenosines at position 233, five adenosines at position 187 and six adenosines position 233, and five adenosines at position 187 and seven adenosines at position 233. FACS analysis of these strains using anti GBS 80 antiserum determined that an intergenic region with five adenosines at position 187 and six adenosines at position 233 had higher expression levels of GBS 80 on their surface than other stains. See FIG. 197 C for results obtained from the FACS analysis. Therefore, manipulating the number of adenosines present at positions 187 and 233 of the AraC and GBS 80 intergenic region may further be used to adapt GBS to increase AI protein expression.

[0465] The invention further includes GBS bacteria which have been adapted to produce increased levels of AI surface protein. In particular, the invention includes GBS bacteria which have been adapted to produce oligomeric or hyperoligomeric AI surface protein, such as GBS 80. In one embodiment, the Gram positive bacteria of the invention are inactivated or attenuated to permit in vivo delivery of the whole bacteria, with the AI surface protein exposed on its surface.

[0466] The invention further includes GBS bacteria which have been adapted to have increased levels of expressed AI protein incorporated in pili on their surface. The GBS bacteria may be adapted to have increased exposure of oligomeric or hyperoligomeric AI proteins on its surface by increasing expression levels of a signal peptidase polypeptide. Increased levels of a local signal peptidase expression in Gram positive bacteria (such us LepA in GAS) are expected to result in increased exposure of pili proteins on the surface of Gram positive bacteria. Increased expression of a leader peptidase in GBS may be achieved by any means known in the art, such as increasing gene dosage and methods of gene upregulation. The GBS bacteria adapted to have increased levels of leader peptidase may additionally be adapted to express increased levels of at least one pili protein.

[0467] Alternatively, the AI proteins of the invention may be expressed on the surface of a non-pathogenic Gram positive bacteria, such as Streptococus gordonii (See, e.g., Byrd et al., “Biological consequences of antigen and cytokine co-expression by recombinant Streptococcus gordonii vaccine vectors”, Vaccine (2002) 20:2197-2205) or Lactococcus lactis (See, e.g., Mannam et al., “Mucosal Vaccine Made from Live, Recombinant Lactococcus lactis Protects Mice against Pharangeal Infection with Streptococcus pyogenes” Infection and Immunity (2004) 72(6):3444-3450). As used herein, non-pathogenic Gram positive bacteria refer to Gram positive bacteria which are compatible with a human host subject and are not associated with human pathogenisis. Preferably, the non-pathogenic bacteria are modified to express the AI surface protein in oligomeric, or hyper-oligomeric form. Sequences encoding for an AI surface protein and, optionally, an AI sortase, may be integrated into the non-pathogenic Gram positive bacterial genome or inserted into a plasmid. The non-pathogenic Gram positive bacteria may be inactivated or attenuated to facilitate in vivo delivery of the whole bacteria, with the AI surface protein exposed on its surface. Alternatively, the AI surface protein may be isolated or purified from a bacterial culture of the non-pathogenic Gram positive bacteria. For example, the AI surface protein may be isolated from cell extracts or culture supernatants. Alternatively, the AI surface protein may be isolated or purified from the surface of the non-pathogenic Gram positive bacteria.

[0468] The non-pathogenic Gram positive bacteria may be used to express any of the Gram positive bacterial Adhesin Island proteins described herein, including proteins from a GBS Adhesin Island, a GAS Adhesin Island, or a S pneumo Adhesin Island. The non-pathogenic Gram positive bacteria are transformed to express an Adhesin Island surface protein. Preferably, the non-pathogenic Gram positive bacteria also express at least one Adhesin Island sortase. The AI transformed non-pathogenic Gram positive bacteria of the invention may be used to prevent or treat infection with a pathogenic Gram positive bacteria, such as GBS, GAS or Streptococcus pneumoniae. The non-pathogenic Gram positive bacteria may express the Gram positive bacterial Adheshin Island proteins in oligomeric forms that further comprise adhesin island proteins encoded within the genome of the non-pathogenic Gram positive bacteria.

[0469] Applicants modified L. lactis to demonstrate that it can express GBS AI polypeptides. L. lactis was transformed with a construct encoding GBS 80 under its own promoter and terminator sequences. The transformed L. lactis appeared to express GBS 80 as shown by Western blot analysis using anti-GBS 80 antiserum. See lanes 6 and 7 of the Western Blots provided in FIGS. 133A and 133B (133A and 133B are two different exposures of the same Western blot). See also Example 13.

[0470] Applicants also transformed L. lactis with a construct encoding GBS AI-1 polypeptides GBS 80, GBS 52, SAG0647, SAG0648, and GBS 104 under the GBS 80 promoter and terminator sequences. These L. lactis expressed high molecular weight structures that were immunoreactive with anti-GBS 80 in immunoblots. See FIG. 134, lane 2, which shows detection of a GBS 80 monomer and higher molecular weight polymers in total transformed L. lactis extracts. Thus, it appeared that L. lactis is capable of expressing GBS 80 in oligomeric form. The high molecular weight polymers were not only detected in L. lactis extracts, but also in the culture supernatants. See FIG. 135 at lane 4. See also Example 14. Thus, the GBS AI polypeptides in oligomeric form can be isolated and purified from either L. lactis cell extracts or culture supernatants. These oligomeric forms can, for instance, be isolated from cell extracts or culture supernatants by release by sonication. See FIGS. 136A and B. See also FIG. 171, which shows purification of GBS pili from whole extracts of L. lactis expressing the GBS AI-1 following sonication and gel filtration on a Sephacryl HR 400 column.

[0471] Furthermore, the L. lactis transformed with the construct encoding GBS AI-1 polypeptides GBS 80, GBS 52, SAG0647, SAG0648, and GBS 104 under the GBS 80 promoter and terminator sequences expressed the GBS AI-1 polypeptides on its surface. FACS analysis of these transformed L. lactis detected cell surface expression of both GBS 80 and GBS 104. The surface expression levels of GBS 80 and GBS 104 on the transformed L. lactis were similar to the surface expression levels of GBS 80 and GBS 104 on GBS strains COH1 and JM9130013, which naturally express GBS AI-1.

[0472] See FIG. 169 for FACS analysis data for L. lactis transformed with GBS AI-1 and wildtype JM9130013 bacteria using anti-GBS 80 and GBS 104 antisera. Table 40 provides the results of FACS analysis of transformed L. lactis, COH1, and JM9130013 bacteria using anti-GBS 80 and anti-GBS 104 antisera. The numbers provided represent the mean fluorescence value difference calculated for immune versus pre-immune sera obtained for each bacterial strain.

TABLE 40
FACS analysis of L. lactis and GBS bacteria strains expressing GBS AI-1

| | Anti-GBS 80 | Anti-GBS 104 |
|---|---|---|
| | antiserum | antiserum |
| GBS AI-1 transformed | 298 | 251 |
| L. lactis | | |
| GBS COH1 | 305 | 305 |
| GBS JM9130013 | 461 | 355 |

Immunogold-electronmicroscopy performed with anti-GBS 80 primary antibodies detected the presence of pilus structures on the surface of the L. lactis bacteria expressing GBS AI-1, confirming the results of the FACS analysis. See FIG. 168 B and C. Interestingly, this expression of GBS pili on the surface of the L. lactis induced L. lactis aggregation. See FIG. 170. Thus, GBS AI polypeptides may also be isolated and purified from the surface of L. lactis. The ability of L. lactis to express GBS AI polypeptides on its surface also demonstrates that it may be useful as a host to deliver GBS AI antigens.

[0473] In fact, immunization of mice with L. lactis transformed with GBS AI-1 was protective in a subsequent challenge with GBS. Female mice were immunized with L. lactis transformed with GBS AI-1. The immunized female mice were bred and their pups were challenged with a dose of GBS sufficient to kill 90% of non-immunized pups. Detailed protocols for intranasal and subcutaneous immunization of mice with transformed L. lactis can be found in Examples 18 and 19, respectively. Table 43 provides data showing that immunization of the female mice with L. lactis expressing GBS AI-1(LL-AI 1) greatly increased survival rate of challenged pups relative to both a negative PBS control (PBS) and a negative L. lactis control (LL 10 E9, which is wild type L. lactis not transformed to express GBS AI-1).

TABLE 43
Protection of Mice Immunized with L. lactis expressing GBS AI-1

| Immunization | | | | Survival | |
|---|---|---|---|---|---|
| Route | Antigen | Alive/Treated | Survival % | % Range | p value |
| Intraperitoneum | Recombinant GBS 80 | 16/18 | 89 | 80-100 | <0.001 |
| Subcutaneous | LL-AI 1 10 E9 | 40/49 | 82 | 70-90 | <0.001 |
| | LL-AI 1 10 E10 | 50/60 | 83 | 60-100 | <0.001 |
| | PBS | 4/30 | 13 | 0-30 | |
| | LL 10 E9 | 3/57 | 5 | 0-20 | |
| Intranasal | LL-AI 1 10 E9 | 22/60 | 37 | 0-100 | 0.02 |
| | LL-AI 1 10 E10 | 31/49 | 63 | 30-90 | <0.001 |
| | LL 10 E9 | 2/27 | 7 | 0-20 | |

[0474] Table 51 provides further evidence that immunization of mice with L. lactis transformed with GBS AI-1 is protective against GBS.

TABLE 51
Further Protection of Mice Immunized with L. lactis expressing GBS AI-1

| | Immunization | Alive/ | Survival % |
|---|---|---|---|
| Antigen | route | Treated | (Pval < 0.0000001) |
| Recombinant GBS 80 | IP | 48/50 | 92 |
| Recombinant GBS 80 | SC | 21/30 | 70 |
| L. lactis + AI1 10⁶ cfu | SC | 6/66 | 9 |
| L. lactis + AI1 10⁷ cfu | SC | 47/70 | 73 |
| L. lactis + AI1 10⁸ cfu | SC | 116/153 | 76 |
| L. lactis + AI1 10⁹ cfu | SC | 98/118 | 83 |
| L. lactis + AI1 10¹⁰ cfu | SC | 107/129 | 83 |
| L. lactis 10¹⁰ cfu | SC | 4/83 | 5 |
| PBS | SC | 6/110 | 5 |
| L. lactis + AI1 10¹⁰ cfu | IN | 51/97 | 52 |
| L. lactis 10¹¹ cfu | IN | 1/40 | 7 |
| PBS | IN | 0/37 | 0 |

[0475] Protection of immunized mice with L. lactis expressing the GBS AI-1 is at least partly due to a newly raised antibody response. Table 46 provides anti-GBS 80 antibody titers detected in serum of the mice immunized with L. lactis expressing the GBS AI-1 as described above. Mice immunized with L. lactis expressing the GBS AI-1 have anti-GBS 80 antibody titres, which are not observed in mice immunized with L. lactis not transformed to express the GBS AI-1. Further, as expected from the survival data, mice subcutaneously immunized with L. lactis transformed to express the GBS AI-1 have significantly higher serum anti-GBS 80 antibody titers than mice intranasally immunized with L. lactis transformed to express the GBS AI-1.

TABLE 46
Antibody Responses against GBS 80 in Serum of Mice
Immunized with L. lactis Expressing GBS AI-1

| | Ab Titre Obtained Following | | |
|---|---|---|---|
| | Subcutaneous | Intranasal | Intraperitoneal |
| Antigen | Immunization | Immunization | Immunization |
| LL 10 E9 | 0 | 0 | |
| LL-AI 1 10 E9 | 14000 | 50 | |
| LL-AI 1 10 E10 | 25000 | 406 | |
| Recombinant GBS 80 | | | 120000 |

[0476] Anti-GBS 80 antibodies of the IgA isotype were specifically detected in various body fluids of the mice subcutaneously or intranasally immunized with L. lactis expressing the GBS AI-1.

TABLE 47
Anti-GBS 80 IgA Antibodies Detected in Mouse Tissues Following
Immunization with L. lactis Expressing GBS AI-1

| | | Anti-GBS 80 IgA | | |
|---|---|---|---|---|
| | | Antibodies Detected in | | |
| Antigen | Immunization route | Serum | Vaginal Wash | Nasal Wash |
| LL 10 E9 | | 0 | 0 | 0 |
| LL-AI 1 | Subcutaneous | 0 | 25 | 20 |
| LL-AI 1 | Intranasal | 140 | 0 | 150 |
| GBS 80 | Intraperitoneal | 60 | 0 | |

[0477] Furthermore, opsonophagocytosis assays also demonstrated that at least some of the antiserum produced against the L. lactis expressing GBS AI 1 is opsonic for GBS. See FIG. 161.

[0478] To obtain protection of against GBS across a greater number of strains and serotypes, it is possible to transform L. lactis with a recombinant GBS AI encoding both GBS AI-1 and AI-2, i.e., a hybrid GBS AI. By way of example, a hybrid GBS AI may be a GBS AI-1 with a replacement of the GBS 104 gene with a GBS 67 gene. A schematic of such a hybrid GBS AI is depicted in FIG. 231 A. A hybrid GBS AI may alternatively be a GBS AI-1 with a replacement of the GBS 52 gene with a GBS 59 gene. See the schematic at FIG. 231 B. Alternatively, a hybrid GBS AI may be a GBS AI-1 with a substitution of a GBS 59 polypeptide for the GBS 52 gene and a substitution of the GBS 104 gene for genes encoding GBS 59 and the two GBS AI-2 sortases. Another example of a hybrid GBS AI is a GBS AI-1 with the substitution of a GBS 59 gene for the GBS 52 gene and a GBS 67 for the GBS 104 gene. See the schematic at FIG. 232. A further example of a hybrid GBS AI is a GBS AI-1 having a GBS 59 gene and genes encoding the GBS AI-2 sortases in place of the GBS 52 gene. Yet another example of a hybrid GBS AI is a GBS AI-1 with a substitution of either GBS 52 or GBS 104 with a fusion protein comprising GBS 322 and one of GBS 59, GBS 67, or GBS 150. Some of these hybrid GBS AIs may be prepared as briefly outlined in FIG. 234 A-F.

[0479] Applicants have prepared a hybrid GBS AI having a GBS AI-1 sequence with a substitution of a GBS 67 coding sequence for the GBS 104 gene as depicted in FIG. 231 A. Transformation of L. lactis with the hybrid GBS AI-1 resulted in L. lactis expression of high molecular weight polymers containing the GBS 80 and GBS 67 proteins. See FIG. 233 A, which provides Western blot analysis of L. lactis transformed with the hybrid GBS AI depicted in FIG. 231 A. When L. lactis transformed with the hybrid GBS AI were probed with antibodies to GBS 80 or GBS 67, high molecular weight structures were detected. See lanes labelled LL+a) in both the α-80 and α-67 immunoblots. The GBS 80 and GBS 67 proteins were confirmed to be present on the surface of L. lactis by FACS analysis. See FIG. 233 B, which shows a shift in fluorescence when GBS 80 and GBS 67 antibodies are used to detect GBS 80 and GBS 67 surface expression. The same shifts in fluorescence were not observed in L. lactis control cells, cells not transformed with the hybrid GBS AI.

[0480] Alternatively, the oligomeric, pilus-like structures may be produced recombinantly. If produced in a recombinant host cell system, the AI surface protein will preferably be expressed in coordination with the expression of one or more of the AI sortases of the invention. Such AI sortases will facilitate oligomeric or hyperoligomeric formation of the AI surface protein subunits.

[0481] AI Sortases of the invention will typically have a signal peptide sequence within the first 70 amino acid residues. They may also include a transmembrane sequence within 50 amino acid residues of the C terminus. The sortases may also include at least one basic amino acid residue within the last 8 amino acids. Preferably, the sortases have one or more active site residues, such as a catalytic cysteine and histidine.

[0482] As shown in FIG. 1, AI-1 includes the surface exposed proteins of GBS 80, GBS 52 and GBS 104 and the sortases SAG0647 and SAG0648. AI-1 typically appears as an insertion into the 3′ end of the trmA gene.

[0483] In addition to the open reading frames encoding the AI-1 proteins, AI-1 may also include a divergently transcribed transcriptional regulator such as araC (i.e., the transcriptional regulator is located near or adjacent to the AI protein open reading frames, but it transcribed in the opposite direction). It is believed that araC may regulate the expression of the AI operon. (See Korbel et al., Nature Biotechnology (2004) 22(7): 911-917 for a discussion of divergently transcribed regulators in E. coli).

[0484] AI-1 may also include a sequence encoding a rho independent transcriptional terminator (see hairpin structure in FIG. 1). The presence of this structure within the adhesin island is thought to interrupt transcription after the GBS 80 open reading frame, leading to increased expression of this surface protein.

[0485] A schematic identifying AI-1 within several GBS serotypes is depicted in FIG. 2. AI-1 sequences were identified in GBS serotype V, strain isolate 2603; GBS serotype III, strain isolate NEM316; GBS serotype II, strain isolate 18RS21; GBS serotype V, strain isolate CJB111; GBS serotype III, strain isolate COH1 and GBS serotype 1a, strain isolate A909. (Percentages shown are amino acid identity to the 2603 sequence). (An AI-1 was not identified in GBS serotype 1b, strain isolate H36B or GBS serotype 1a, strain isolate 515).

[0486] An alignment of AI-1 polynucleotide sequences from serotype V, strain isolates 2603 and CJB111; serotype II, strain isolate 18RS21; serotype III, strain isolates COH1 and NEM316; and serotype 1a, strain isolate A909 is presented in FIG. 18. An alignment of amino acid sequences of AI-1 surface protein GBS 80 from serotype V, strain isolates 2603 and CJB111; serotype 1a, strain isolate A909; serotype III, strain isolates COH1 and NEM316 is presented in FIG. 22. An alignment of amino acid sequences of AI-1 surface protein GBS 104 from serotype V, strain isolates 2603 and CJB111; serotype III, strain isolates COH1 and NEM316; and serotype II, strain isolate 18RS21 is presented in FIG. 23. Preferred AI-1 polynucleotide and amino acid sequences are conserved among two or more GBS serotypes or strain isolates.

[0487] As shown in this figure, the full length of surface protein GBS 80 is particularly conserved among GBS serotypes V (strain isolates 2603 and CJBIII), III (strain isolates NEM316 and COH1), and Ia (strain isolate A909). The GBS 80 surface protein is missing or fragmented in serotypes II (strain isolate 18RS21), Ib (strain isolate H36B) and Ia (strain isolate 515).

[0488] Polynucleotide and amino acid sequences for AraC are set forth in FIG. 30.

GBS Adhesin Island 2

[0489] A second adhesin island, “Adhesin Island 2” or “AI-2” or GBS AI-2” has also been identified in numerous GBS serotypes. A schematic depicting the correlation between AI-1 and AI-2 within the GBS serotype V, strain isolate 2603 is shown in FIG. 3. (Homology percentages in FIG. 3 represent amino acid identity of the AI-2 proteins to the AI-1 proteins). Alignments of AI-2 polynucleotide sequences are presented in FIGS. 20 and 21 (FIG. 20 includes sequences from serotype V, strain isolate 2603 and serotype III, strain isolate NEM316. FIG. 21 includes sequences from serotype III, strain isolate COH1 and serotype Ia, strain isolate A909). An alignment of amino acid sequences of AI-2 surface protein GBS 067 from serotype V, strain isolates 2603 and CJB111; serotype 1a, strain isolate 515; serotype II, strain isolate 18RS21; serotype Ib, strain isolate H36B; and serotype III, strain isolate NEM316 is presented in FIG. 24. Preferred AI-2 polynucleotide and amino acid sequences are conserved among two or more GBS serotypes or strain isolates.

[0490] AI-2 comprises a series of approximately five open reading frames encoding for a collection of amino acid sequences comprising surface proteins and sortases. Specifically, AI-2 includes open reading frames encoding for two or more (i.e., 2, 3, 4, 5 or more) of GBS 67, GBS 59, GBS 150, SAG1405, SAG1406, 01520, 01521, 01522, 01523, 01523, 01524 and 01525. In one embodiment, AI-2 includes open reading frames encoding for two or more of GBS 67, GBS 59, GBS 150, SAG1405, and SAG1406. Alternatively, AI-2 may include open reading frames encoding for two or more of 01520, 01521, 01522, 01523, 01523, 01524 and 01525.

[0491] One or more of the surface proteins typically include an LPXTG motif (such as LPXTG (SEQ ID NO: 122)) or other sortase substrate motif. The GBS AI-2 sortase proteins are thought to be involved in the secretion and anchoring of the LPXTG containing surface proteins. GBS AI-2 may encode for at least one surface protein. Alternatively, AI-2 may encode for at least two surface proteins and at least one sortase. Preferably, GBS AI-2 encodes for at least three surface proteins and at least two sortases. One or more of the AI-2 surface proteins may include an LPXTG or other sortase substrate motif.

[0492] One or more of the surface proteins may also typically include pilin motif. The pilin motif may be involved in pili formation. Cleavage of AI surface proteins by sortase between the threonine and glycine residue of an LPXTG motif yields a thioester-linked acyl intermediate of sortase. The first lysine residue in a pilin motif can serve as an amino group acceptor of the cleaved LPXTG motif and thereby provide a covalent linkage between AI subunits to form pili. For example, the pilin motif can make a nucleophilic attack on the acyl enzyme providing a covalent linkage between AI subunits to form pili and regenerate the sortase enzyme. Some examples of pilin motifs that may be present in the GBS AI-2 proteins include ((YPKN(X₈)K; SEQ ID NO: 158), (PK(X₈)K; SEQ ID NO: 159), (YPK(X₉)K; SEQ ID NO: 160), (PKN(X₈)K; SEQ ID NO: 161), or (PK(X₁₀)K; SEQ ID NO: 162)).

[0493] One or more of the surface protein may also include an E box motif. The E box motif contains a conserved glutamic acid residue that is believed to be necessary for pilus formation. Some examples of E box motifs may include the amino acid sequences YxLxETxAPxG (SEQ ID NO: 163), YxxxExxAxxGY (SEQ ID NO: 164), YxLxExxxPxDY (SEQ ID NO: 165), or YxLxETxAPxGY (SEQ ID NO: 152).

[0494] As shown in FIG. 3, GBS AI-2 may include the surface exposed proteins of GBS 67, GBS 59 and GBS 150 and the sortases of SAG1406 and SAG1405. Alternatively, GBS AI-2 may include the proteins 01521, 01524 and 01525 and sortases 01520 and 01522. GBS 067 and 01524 are preferred AI-2 surface proteins.

[0495] AI-2 may also include a divergently transcribed transcriptional regulator such as a RofA like protein (for example rogB). As in AI-1, rogB is thought to regulate the expression of the AI-2 operon.

[0496] A schematic depiction of AI-2 within several GBS serotypes is depicted in FIG. 4. (Percentages shown are amino acid identity to the 2603 sequence). While the AI-2 surface proteins GBS 59 and GBS 67 are more variable across GBS serotypes than the corresponding AI-1 surface proteins, AI-2 surface protein GBS 67 appears to be conserved in GBS serotypes where the AI-1 surface proteins are disrupted or missing.

[0497] For example, as discussed above and in FIG. 2, the AI-1 GBS 80 surface protein is fragmented in GBS serotype II, strain isolate 18RS21. Within AI-2 for this same sequence, as shown in FIG. 4, the GBS 67 surface protein has 99% amino acid sequence homology with the corresponding sequence in strain isolate 2603. Similarly, the AI-1 GBS 80 surface protein appears to be missing in GBS serotype Ib, strain isolate H36B and GBS serotype Ia, strain isolate 515. Within AI-2 for these sequences, however, the GBS 67 surface protein has 97-99% amino acid sequence homology with the corresponding sequence in strain isolate 2603. GBS 67 appears to have two allelic variants, which can be divided according to percent homology with strains 2603 and H36B. See FIGS. 237-239.

[0498] Unlike for GBS 67, amino acid sequence identity of GBS 59 is variable across different GBS strains. As shown in FIGS. 63 and 224, GBS 59 of GBS strain isolate 2603 shares 100% amino acid residue homology with GBS strain 18RS21, 62% amino acid sequence homology with GBS strain H36B, 48% amino acid residue homology with GBS strain 515 and GBS strain CJB111, and 47% amino acid residue homology with GBS strain NEM316. The amino acid sequence homologies of the different GBS strains suggest that there are two isoforms of GBS 59. The first isoform appears to include the GBS 59 protein of GBS strains CJB111, NEM316, and 515. The second isoform appears to include the GBS 59 protein of GBS strains 18RS21, 2603, and H36B. (See FIGS. 63 and 224.) As expected from the variability in GBS 59 isoforms, antibodies specific for the first GBS 59 isoform detect the first but not the second GBS 59 isoform and antibodies specific for the second GBS 59 isoform detect the second but not the first GBS 59 isoform. See FIG. 226A, which shows FACS analysis of 28 GBS strains having a GBS 59 gene detected using PCR for GBS 59 surface expression. For each of the 28 GBS strains, FACS analysis was performed using either an antibody for GBS 59 isoform 1 (α-Cjb111) or GBS 59 isoform 2 (α-2603). Only one of the two antibodies detected GBS 59 surface expression on each GBS strain. As a negative control, GBS strains in which a GBS 59 gene was not detectable by PCR did not have significant GBS 59 surface expression levels. FIG. 226B.

[0499] Also, GBS 59 is opsonic only against GBS strains expressing a homologous GBS 59 protein. See FIG. 225.

[0500] In one embodiment, the immunogenic composition of the invention comprises a first and a second isoform of the GBS 59 protein to provide protection across a wide range of GBS serotypes that express polypeptides from a GBS AI-2. The first isoform may be the GBS 59 protein of GBS strain CJB111, NEM316, or 515. The second isoform may be the GBS 59 protein of GBS strain 18RS21, 2603, or H36B.

[0501] The gene encoding GBS 59 has been identified in a high number of GBS isolates; the GBS 59 gene was detected in 31 of 40 GBS isolates tested (77.5%). The GBS 59 protein also appears to be present as part of a pilus in whole extracts derived from GBS strains. FIG. 64 shows detection of high molecular weight GBS 59 polymers in whole extracts of GBS strains CJB111, 7357B, COH31, D1363C, 5408, 1999, 5364, 5518, and 515 using antiserum raised against GBS 59 of GBS strain CJB111. FIG. 65 also shows detection of these high molecular weight GBS 59 polymers in whole extracts of GBS strains D136C, 515, and CJB111 with anti-GBS 59 antiserum. (See also FIG. 220 A for detection of GBS 59 high molecular weight polymers in strain 515.) FIG. 65 confirms the presence of different isoforms of GBS 59. Antisera raised against two different GBS 59 isoforms results in different patterns of immunoreactivity depending on the GBS strain origin of the whole extract. FIG. 65 further shows detection of GBS 59 monomers in purified GBS 59 preparations.

[0502] GBS 59 is also highly expressed on the surface of GBS strains. GBS 59 was detected on the surface of GBS strains CJB111, DK1, DK8, Davis, 515, 2986, 5551, 1169, and 7357B by FACS analysis using mouse antiserum raised against GBS 59 of GBS CJB111. FACS analysis did not detect surface expression of GBS 59 in GBS strains SMU071, JM9130013, and COH1, which do not contain a GBS 59 gene. (See FIG. 66.) Further confirmation that GBS 59 is expressed on the surface of GBS is detection of GBS 59 by immuno-electron microscopy on the surface of GBS strain 515 bacteria. See FIG. 215.

[0503] GBS 67 and GBS 150 also appear to be included in high molecular weight structures, or pili. FIG. 69 shows that anti-GBS 67 and anti-GBS 150 immunoreact with high molecular weight structures in whole GBS strain 515 extracts. (See also FIG. 220 B and C.) It is also notable in FIG. 69 that the anti-GBS 59 antisera, raised in a mouse following immunization with GBS 59 of GBS strain 2603, does not cross-hybridize with GBS 59 in GBS strain 515. GBS 59 of GBS stain 515 is of a different isotype than GBS 59 of GBS stain 2603. See FIG. 63, which illustrates that the homology of these two GBS 59 polypeptides is 48%, and FIG. 65, which confirms that GBS 59 antisera raised against GBS strain 2603 does not cross-hybridize with GBS 59 of GBS strain 515.

[0504] Formation of pili containing GBS 150 does not appear to require GBS 67 expression. FIG. 70 provides Western blots showing that higher molecular weight structures in GBS strain 515 total extracts immunoreact with anti-GBS 67 and anti-GBS 150 antiserum. In a GBS strain 515 lacking GBS 67 expression, anti-GBS 67 antiserum no longer immunoreacts with polypeptides in total extracts, while anti-GBS 150 antiserum is still able to cross-hybridze with high molecular weight structures.

[0505] Likewise, formation of pili containing GBS 59 does not appear to require GBS 67 expression. As expected, FACS detects GBS 67 cell surface expression on wildtype GBS strain 515, but not GBS strain 515 cells knocked out for GBS 67. FACS analysis using anti-GBS 59 antisera, however, detects GBS 59 expression on both the wildtype GBS strain 515 cells and the GBS strain 515 cells knocked out for GBS 67. Thus, GBS 59 cell surface expression is detected on GBS stain 515 cells regardless of GBS 67 expression.

[0506] GBS 67, while present in pili, appears to be localized around the surface of GBS strain 515 cells. See the immuno-electron micrographs presented in FIG. 216. GBS 67 binds to fibronectin. See FIG. 217.

[0507] Formation of pili encoded by GBS AI-2 does require expression of GBS 59. Deletion of GBS 59 from strain 515 bacteria eliminates detection of high molecular weight structures by antibodies that bind to GBS 59 (FIG. 221 A, lane 3), GBS 67 (FIG. 221 B, lane 3), and GBS 150 (FIG. 221 C, lane 3). By contrast, Western blot analysis of 515 bacteria with a deletion of the GBS 67 gene detects high molecular weight structures using GBS 59 (FIG. 221 A, lane 2) and GBS 150 (FIG. 221 C, lane 2) antisera. Similarly, Western blot analysis of 515 bacteria with a deletion of the GBS 150 gene detects high molecular weight structures using GBS 59 (FIG. 221 A, lane 4) and GBS 67 (FIG. 221 B, lane 4). See also FIG. 223, which provides Western blots of each of the 515 strains interrogated with antibodies for GBS 59, GBS 67, and GBS 150. FACS analysis of strain 515 bacteria deleted for either GBS 59 or GBS 67 confirms these results. See FIG. 222, which shows that only deletion of GBS 59 abolishes surface expression of both GBS 59 and GBS 67.

[0508] Formation of pili encoded by GBS AI-2 also requires expression of both GBS adhesin island-2 encoded sortases. See FIG. 218, which provides Western blot analysis of strain 515 bacteria lacking Srt1, Srt2, or both Srt1 and Srt2. Only deletion of both Srt1 and Srt2 abolishes pilus assembly as detected by antibodies that cross-hybridize with each of GBS 59, GBS 67 and GBS 150. The results of the Western blot analysis were verified by FACS, which provided similar results. See FIG. 219.

[0509] As shown in FIG. 4, two of the GBS strain isolates (COH1 and A909) do not appear to contain homologues to the surface proteins GBS 59 and GBS 67. For these two strains, the percentages shown in FIG. 4 are amino acid identity to the COH1 protein). Notwithstanding the difference in the surface protein lengths for these two strains, AI-2 within these sequences still contains two sortase proteins and three LPXTG containing surface proteins, as well as a signal peptidase sequence leading into the first surface protein. One of the surface proteins in this variant of AI-2, spb1, has previously been identified as a potential adhesion protein. (See Adderson et al., Infection and Immunity (2003) 71(12):6857-6863). Alternatively, because of the lack of GBS 59 and GBS 67 sequences, this variant of AI-2 may be a third type of AI (Adhesin Island-3, AI-3, or GBS AI-3).

[0510] More than one AI surface protein may be present in the oligomeric, pilus-like structures of the invention. For example, GBS 59 and GBS 67 may be incorporated into an oligomeric structure. Alternatively, GBS 59 and GBS 150 may be incorporated into an oligomeric structure, or GBS 59, GBS 150 and GBS 67 may be incorporated into an oligomeric structure.

[0511] In another embodiment, the invention includes compositions comprising two or more AI surface proteins. The composition may include surface proteins from the same adhesin island. For example, the composition may include two or more GBS AI-2 surface proteins, such as GBS 59, GBS 67 and GBS 150. The surface proteins may be isolated from Gram positve bacteria or they may be produced recombinantly.

GAS Adhesin Islands

[0512] As discussed above, Applicants have identified at least four different GAS Adhesin Islands. These adhesion islands are thought to encode surface proteins which are important in the bacteria's virulence, and Applicants have obtained the first electron micrographs revealing the presence of these adhesin island proteins in hyperoligomeric pilus structures on the surface of Group A Streptococcus.

[0513] Group A Streptococcus is a human specific pathogen which causes a wide variety of diseases ranging from pharyngitis and impetigo through life threatening invasive disease and necrotizing fascilitis. In addition, post-streptococcal autoimmune responses are still a major cause of cardiac pathology in children.

[0514] Group A Streptococcal infection of its human host can generally occur in three phases. The first phase involves attachment and/or invasion of the bacteria into host tissue and multiplication of the bacteria within the extracellular spaces. Generally this attachment phase begins in the throat or the skin. The deeper the tissue level infected, the more severe the damage that can be caused. In the second stage of infection, the bacteria secretes a soluble toxin that diffuses into the surrounding tissue or even systemically through the vasculature. This toxin binds to susceptible host cell receptors and triggers innappropropriate immune responses by these host cells, resulting in pathology. Because the toxin can diffuse throughout the host, the necrosis directly caused by the GAS toxins may be physically located in sites distant from the bacterial infection. The final phase of GAS infection can occur long after the original bacteria have been cleared from the host system. At this stage, the host's previous immune response to the GAS bacteria due to cross reactivity between epitopes of a GAS surface protein, M, and host tissues, such as the heart. A general review of GAS infection can be found in Principles of Bacterial Pathogeneis, Groisman ed., Chapter 15 (2001).

[0515] In order to prevent the pathogenic effects associated with the later stages of GAS infection, an effective vaccine against GAS will preferably facilitate host elimination of the bacteria during the initial attachment and invasion stage.

[0516] Isolates of Group A Streptococcus are historically classified according to the M surface protein described above. The M protein is surface exposed trypsin-sensitive protein generally comprising two polypeptide chains complexed in an alpha helical formation. The carboxyl terminus is anchored in the cytoplasmic membrane and is highly conserved among all group A streptococci. The amino terminus, which extend through the cell wall to the cell surface, is responsible for the antigenic variability observed among the 80 or more serotypes of M proteins.

[0517] A second layer of classification is based on a variable, trypsin-resistant surface antigen, commonly referred to as the T-antigen. Decades of epidemiology based on M and T serological typing have been central to studies on the biological diversity and disease causing potential of Group A Streptococci. While the M-protein component and its inherent variability have been extensively characterized, even after five decades of study, there is still very little known about the structure and variability of T-antigens. Antisera to define T types is commercially available from several sources, including Sevapharma (http://www.sevapharma.cz/en).

[0518] The gene coding for one form of T-antigen, T-type 6, from an M6 strain of GAS (D741) has been cloned and characterized and maps to an approximately 11 kb highly variable pathogenicity island. Schneewind et al., J. Bacteriol. (1990) 172(6):3310-3317. This island is known as the Fibronectin-binding, Collagen-binding T-antigen (FCT) region because it contains, in addition to the T6 coding gene (tee6), members of a family of genes coding for Extra Cellular Matrix (ECM) binding proteins. Bessen et al., Infection & Immunity (2002) 70(3):1159-1167. Several of the protein products of this gene family have been shown to directly bind either fibronectin and/or collagen. See Hanski et al., Infection & Immunity (1992) 60(12):5119-5125; Talay et al., Infection & Immunity (1992(60(9):3837-3844; Jaffe et al. (1996) 21(2):373-384; Rocha et al., Adv Exp Med Biol. (1997) 418:737-739; Kreikemeyer et al., J Biol Chem (2004) 279(16):15850-15859; Podbielski et al., Mol. Microbiol. (1999) 31(4):1051-64; and Kreikemeyer et al., Int. J. Med Microbiol (2004) 294(2-3):177-88. In some cases direct evidence for a role of these proteins in adhesion and invasion has been obtained.

[0519] Applicants raised antiserum against a recombinant product of the tee6 gene and used it to explore the expression of T6 in M6 strain 2724. In immunoblot of mutanolysin extracts of this strain, the antiserum recognized, in addition to a band corresponding to the predicted molecular mass of the product, very high molecular weight ladders ranging in mobility from about 100 kDa to beyond the resolution of the 3-8% gradient gels used.

[0520] This pattern of high molecular weight products is similar to that observed in immunoblots of the protein components of the pili identified in Streptococcus agalactiae (described above) and previously in Corynebacterium diphtheriae. Electron microscropy of strain M6_{—}2724 with antisera specific for the product of tee6 revealed abundant surface staining and long pilus like structures extending up to 700 nanometers from the bacterial surface, revealing that the T6 protein, one of the antigens recognized in the original Lancefiled serotyping system, is located within a GAS Adhesin Island (GAS AI-1) and forms long covalently linked pilus structures.

[0521] Applicants have identified at least four different Group A Streptococcus Adhesin Islands. While these GAS AI sequences can be identified in numerous M types, Applicants have surprisingly discovered a correlation between the four main pilus subunits from the four different GAS AI types and specific T classifications. While other trypsin-resistant surface exposed proteins are likely also implicated in the T classification designations, the discovery of the role of the GAS adhesin islands (and the associated hyper-oligomeric pilus like structures) in T classification and GAS serotype variance has important implications for prevention and treatment of GAS infections. Applicants have identified protein components within each of the GAS adhesin islands which are associated with the pilus formation. These proteins are believed to be involved in the bacteria's initial adherence mechanisms. Immunological recognition of these proteins may allow the host immune response to slow or prevent the bacteria's transition into the more pathogenic later stages of infection.

[0522] In addition, Applicants have discovered that the GBS pili structures appear to be implicated in the formation of biofilms (populations of bacteria growing on a surface, often enclosed in an exopolysaccharide matrix). Biofilms are generally associated with bacterial resistance, as antibiotic treatments and host immune response are frequently unable to erradicate all of the bacteria components of the biofilm. Direction of a host immune response against surface proteins exposed during the first steps of bacterial attachment (i.e., before complete biofilm formation) is preferable.

[0523] The invention therefore provides for improved immunogenic compositions against GAS infection which may target GAS bacteria during their initial attachment efforts to the host epithelial cells and may provide protection against a wide range of GAS serotypes. The immunogenic compositions of the invention include GAS AI surface proteins which may be formulated in an oligomeric, or hyperoligomeric (pilus) form. The invention also includes combinations of GAS AI surface proteins. Combinations of GAS AI surface proteins may be selected from the same adhesin island or they may be selected from different GAS adhesin islands.

[0524] While there is surprising variability in the number and sequence of the GAS AI components across isolates, GAS AI sequences may be generally characterized as Type 1, Type 2, Type 3, and Type 4, depending on the number and type of sortase sequence within the island and the percentage identity of other proteins within the island. Schematics of the GAS adhesin islands are set forth in FIG. 51A and FIG. 162. In all strains identified so far, the adhesin island region is flanked by highly conserved open reading frames M1_{—}123 and M1_{—}136. Between three and five genes in each GAS adhesin island code for ECM binding adhesin proteins containing LPXTG motifs.

GAS Adhesin Island 1

[0525] As discussed above, Applicants have identified adhesin islands, “GAS Adhesin Island 1” or “GAS AI-1”, within the genome Group A Streptococcus serotypes and isolates. GAS AI-1 comprises a series of approximately five open reading frames encoding for a collection of amino acid sequences comprising surface proteins and sortases (“GAS AI-1 proteins”). GAS AI-1 preferably comprises surface proteins, a srtB sortase, and a rofA divergently transcribed transcriptional regulator. GAS AI-1 surface proteins may include a fibronectin binding protein, a collagen adhesion protein and a fimbrial structural subunit. Preferably, each of these GAS AI-1 surface proteins includes an LPXTG sortase substrate motif, such as LPXTG (SEQ ID NO: 122) or LPXSG (SEQ ID NO: 134) (conservative replacement of threonine with serine). Specifically, GAS AI-1 includes open reading frames encoding for two or more (i.e., 2, 3, 4 or 5) of M6_Spy0157, M6_Spy0158, M6_Spy0159, M6_Spy0160, M6_Spy0161.

[0526] Applicants have also identified open reading frames encoding fimbrial structural subunits in other GAS bacteria harbouring an AI-1. These open reading frames encode fimbrial structural subunits CDC SS 410_fimbrial, ISS3650_fimbrial, and DSM2071_fimbrial. A GAS AI-1 may comprise a polynucleotide encoding any one of CDC SS 410_fimbrial, ISS3650_fimbrial, and DSM2071_fimbrial.

[0527] As discussed above, the hyper-oligomeric pilus structure of GAS AI-1 appears to be responsible for the T-antigen type 6 classification, and GAS AI-1 corresponds to the FCT region previously identified for tee6. As in GAS AI-1, the tee6 FCT region includes open reading frames encoding for a collagen adhesion protein (cpa, capsular polysaccharide adhesion) and a fibronectin binding protein (prtF1). Immunoblots of tee6, a GAS AI-1 fimbrial structural subunit corresponding to M6_Spy160, reveal high molecular weight structures indicative of the hyper-oligomeric pilus structures. Immunoblots with antiserum specific for Cpa also recognize a high molecular weight ladder structure, indicating Cpa involvement in the GAS AI-1 pilus structure or formation. In EM photos of GAS bacteria, Cpa antiserum reveals abundant staining on the surface of the bacteria and occasional gold particles extended from the surface of the bacteria. In contrast, immunoblots with antiserum specific for PrtF1 recognize only a single molecular species with electrophoretic mobility corresponding to its predicted molecular mass, indicating that PrtF1 may not be associated with the oligomeric pilus structure. A preferred immunogenic composition of the invention comprises a GAS AI-1 surface protein which may be formulated or purified in an oligomeric (pilis) form. In a preferred embodiment, the oligomeric form is a hyperoligomer. Another preferred immunogenic composition of the invention comprises a GAS AI-1 surface protein which has been isolated in an oligomeric (pilis) form. The oligomer or hyperoligomeric pilus structures comprising the GAS AI-1 surface proteins may be purified or otherwise formulate for use in immunogenic compositions.

[0528] One or more of the GAS AI-1 open reading frame polynucleotide sequences may be replaced by a polynucleotide sequence coding for a fragment of the replaced ORF. Alternatively, one or more of the GAS AI-1 open reading frames may be replaced by a sequence having sequence homology to the replaced ORF.

[0529] One or more of the GAS AI-1 surface protein sequences typically include an LPXTG motif (such as LPXTG (SEQ ID NO: 122)) or other sortase substrate motif.

[0530] The LPXTG sortase substrate motif of a GAS AI surface protein may be generally represented by the formula XXXXG, wherein X at amino acid position 1 is an L, a V, an E, or a Q, wherein X at amino acid position 2 is a P if X at amino acid position 1 is an L, wherein X at amino acid position 2 is a V if X at amino acid position 1 is a E or a Q, wherein X at amino acid position 2 is a V or a P if X at amino acid position 1 is a V, wherein X at amino acid position 3 is any amino acid residue, wherein X at amino acid position 4 is a T if X at amino acid position 1 is a V, E, or Q, and wherein X at amino acid position 4 is a T, S, or A if X at amino acid position 1 is an L. Some examples of LPXTG motifs present in GAS AI surface proteins include LPSXG (SEQ ID NO: 134), VVXTG (SEQ ID NO: 135), EVXTG (SEQ ID NO: 136), VPXTG (SEQ ID NO: 137), QVXTG (SEQ ID NO: 138), LPXAG (SEQ ID NO: 139), QVPTG (SEQ ID NO: 140), and FPXTG (SEQ ID NO: 141).

[0531] The GAS AI surface proteins of the invention may affect the ability of the GAS bacteria to adhere to and invade epithelial cells. AI surface proteins may also affect the ability of GAS to translocate through an epithelial cell layer. Preferably, one or more GAS AI surface proteins are capable of binding to or otherwise associating with an epithelial cell surface. GAS AI surface proteins may also be able to bind to or associate with fibrinogen, fibronectin, or collagen.

[0532] The GAS AI-1 sortase proteins are predicted to be involved in the secretion and anchoring of the LPXTG containing surface proteins. GAS AI-1 may encode for at least one surface protein. Alternatively, GAS AI-1 may encode for at least two surface exposed proteins and at least one sortase. Preferably, GAS AI-1 encodes for at least three surface exposed proteins and at least two sortases.

[0533] The AI surface proteins may be covalently attached to the bacterial cell wall by membrane-associated transpeptidases, such as an AI sortase. The sortase may function to cleave the surface protein, preferably between the threonine and glycine residues of an LPXTG motif. The sortase may then assist in the formation of an amide link between the threonine carboxyl group and a cell wall precursor such as lipid II. The precursor can then be incorporated into the peptidoglycan via the transglycoslylation and transpeptidation reactions of bacterial wall synthesis. See Comfort et al., Infection & Immunity (2004) 72(5): 2710-2722.

[0534] GAS AI-1 preferably includes a srtB sortase. GAS srtB sortases may preferably anchor surface proteins with an LPSTG motif (SEQ ID NO: 166), particularly where the motif is followed by a serine.

[0535] In one embodiment, the invention includes a composition comprising oligomeric, pilus-like structures comprising a GAS AI-1 surface protein such as M6_Spy0157, M6_Spy0159, M6_Spy0160, CDC SS 410_fimbrial, ISS3650_fimbrial, or DSM2071_fimbrial. The oligomeric, pilus-like structure may comprise numerous units of AI surface protein. Preferably, the oligomeric, pilus-like structures comprise two or more AI surface proteins. Still more preferably, the oligomeric, pilus-like structure comprises a hyper-oligomeric pilus-like structure comprising at least two (e.g., 2, 3, 4, 5, 6, 7, 8, 9, 10, 11, 12, 13, 14, 15, 20, 25, 30, 35, 40, 45, 50, 60, 70, 80, 90, 100, 120, 140, 150, 200 or more) oligomeric subunits, wherein each subunit comprises an AI surface protein or a fragment thereof. The oligomeric subunits may be covalently associated via a conserved lysine within a pilin motif. The oligomeric subunits may be covalently associated via an LPXTG motif, preferably, via the threonine or serine amino acid residue, respectively:

[0536] AI surface proteins or fragments thereof to be incorporated into the oligomeric, pilus-like structures of the invention will preferably include a pilin motif.

[0537] The oligomeric, pilus like structures may be used alone or in the combinations of the invention. In one embodiment, the invention comprises a GAS Adhesin Island protein in oligomeric form, preferably in a hyperoligomeric form. In one embodiment, the invention comprises a composition comprising one or more GAS Adhesin Island 1 (“GAS AI-1”) proteins and one or more GAS Adhesin Island 2 (“GAS AI-2”), GAS Adhesin Island 3 (“GAS AI-3”), or GAS Adhesin Island 4 (“GAS AI-4”) proteins, wherein one or more of the GAS Adhesin Island proteins is in the form of an oligomer, preferably in a hyperoligomeric form.

[0538] In addition to the open reading frames encoding the GAS AI-1 proteins, GAS AI-1 may also include a divergently transcribed transcriptional regulator such as RofA (i.e., the transcriptional regulator is located near or adjacent to the AI protein open reading frames, but it transcribed in the opposite direction).

GAS Adhesin Island 2

[0539] A second adhesin island, “GAS Adhesin Island 2” or “GAS AI-2” has also been identified in Group A Streptococcus serotypes and isolates. GAS AI-2 comprises a series of approximately eight open reading frames encoding for a collection of amino acid sequences comprising surface proteins and sortases (“GAS AI-2 proteins”). Specifically, GAS AI-2 includes open reading frames encoding for two or more (i.e., 2, 3, 4, 5, 6, 7, or 8) of GAS15, Spy0127, GAS16, GAS17, GAS18, Spy0131, Spy0133, and GAS20.

[0540] A preferred immunogenic composition of the invention comprises a GAS AI-2 surface protein which may be formulated or purified in an oligomeric (pilis) form. In a preferred embodiment, the oligomeric form is a hyperoligomer. Another preferred immunogenic composition of the invention comprises a GAS AI-2 surface protein which has been isolated in an oligomeric (pilis) form. The oligomer or hyperoligomeric pilus structures comprising the GAS AI-2 surface proteins may be purified or otherwise formulate for use in immunogenic compositions.

[0541] One or more of the GAS AI-2 open reading frame polynucleotide sequences may be replaced by a polynucleotide sequence coding for a fragment of the replaced ORF. Alternatively, one or more of the GAS AI-2 open reading frames may be replaced by a sequence having sequence homology to the replaced ORF.

[0542] One or more of the GAS AI-2 surface protein sequences typically include an LPXTG motif (such as LPXTG (SEQ ID NO: 122)) or other sortase substrate motif. The AI surface proteins of the invention may affect the ability of the GAS bacteria to adhere to and invade epithelial cells. AI surface proteins may also affect the ability of GAS to translocate through an epithelial cell layer. Preferably, one or more AI surface proteins are capable of binding to or otherwise associating with an epithelial cell surface. AI surface proteins may also be able to bind to or associate with fibrinogen, fibronectin, or collagen.

[0543] The GAS AI-2 sortase proteins are predicted to be involved in the secretion and anchoring of the LPXTG containing surface proteins. GAS AI-2 may encode for at least one surface protein. Alternatively, GAS AI-2 may encode for at least two surface exposed proteins and at least one sortase. Preferably, GAS AI-2 encodes for at least three surface exposed proteins and at least two sortases.

[0544] The AI surface proteins may be covalently attached to the bacterial cell wall by membrane-associated transpeptidases, such as an AI sortase. The sortase may function to cleave the surface protein, preferably between the threonine and glycine residues of an LPXTG motif. The sortase may then assist in the formation of an amide link between the threonine carboxyl group and a cell wall precursor such as lipid II. The precursor can then be incorporated into the peptidoglycan via the transglycoslylation and transpeptidation reactions of bacterial wall synthesis. See Comfort et al., Infection & Immunity (2004) 72(5): 2710-2722.

[0545] In one embodiment, the invention includes a composition comprising oligomeric, pilus-like structures comprising an AI surface protein such as GAS 15, GAS 16, or GAS 18. The oligomeric, pilus-like structure may comprise numerous units of AI surface protein. Preferably, the oligomeric, pilus-like structures comprise two or more AI surface proteins. Still more preferably, the oligomeric, pilus-like structure comprises a hyper-oligomeric pilus-like structure comprising at least two (e.g., 2, 3, 4, 5, 6, 7, 8, 9, 10, 11, 12, 13, 14, 15, 20, 25, 30, 35, 40, 45, 50, 60, 70, 80, 90, 100, 120, 140, 150, 200 or more) oligomeric subunits, wherein each subunit comprises an AI surface protein or a fragment thereof. The oligomeric subunits may be covalently associated via a conserved lysine within a pilin motif. The oligomeric subunits may be covalently associated via an LPXTG motif, preferably, via the threonine amino acid residue.

[0546] AI surface proteins or fragments thereof to be incorporated into the oligomeric, pilus-like structures of the invention will preferably include a pilin motif.

[0547] The oligomeric, pilus like structures may be used alone or in the combinations of the invention. In one embodiment, the invention comprises a GAS Adhesin Island protein in oligomeric form, preferably in a hyperoligomeric form. In one embodiment, the invention comprises a composition comprising one or more GAS Adhesin Island 2 (“GAS AI-2”) proteins and one or more GAS Adhesin Island 1 (“GAS AI-1”), GAS Adhesin Island 3 (“GAS AI-3”), or GAS Adhesin Island 4 (“GAS AI-4”) proteins, wherein one or more of the Adhesin Island proteins is in the form of an oligomer, preferably in a hyperoligomeric form.

[0548] In addition to the open reading frames encoding the GAS AI-2 proteins, GAS AI-2 may also include a divergently transcribed transcriptional regulator such as rofA (i.e., the transcriptional regulator is located near or adjacent to the AI protein open reading frames, but it transcribed in the opposite direction).

GAS Adhesin Island 3

[0549] A third adhesin island, “GAS Adhesin Island 3” or “GAS AI-3” has also been identified in several Group A Streptococcus serotypes and isolates. GAS AI-3 comprises a series of approximately seven open reading frames encoding for a collection of amino acid sequences comprising surface proteins and sortases (“GAS AI-3 proteins”). Specifically, GAS AI-3 includes open reading frames encoding for two or more (i.e., 2, 3, 4, 5, 6, or 7) of SpyM3_{—}0098, SpyM3_{—}0099, SpyM3_{—}0100, SpyM3_{—}0101, SpyM3_{—}0102, SpyM3_{—}0103, SpyM3_{—}0104, SPs0100, SPs0101, SPs0102, SPs0103, SPs0104, SPs0105, SPs0106, orf78, orf79, orf80, orf81, orf82, orf83, orf84, spyM18_{—}0126, spyM18_{—}0127, spyM18_{—}0128, spyM18_{—}0129, spyM18_{—}0130, spyM18_{—}0131, spyM18_{—}0132, SpyoM01000156, SpyoM01000155, SpyoM01000154, SpyoM01000153, SpyoM01000152, SpyoM01000151, SpyoM01000150, and SpyoM01000149. In one embodiment, GAS AI-3 includes open reading frames encoding for two or more (i.e., 2, 3, 4, 5, 6, or 7) of SpyM3_{—}0098, SpyM3_{—}0099, SpyM3_{—}0100, SpyM3_{—}0101, SpyM3_{—}0102, SpyM3_{—}0103, and SpyM3_{—}0104. In another embodiment, GAS AI-3 includes open reading frames encoding for two or more (i.e., 2, 3, 4, 5, 6, or 7) of SPs0100, SPs0101, SPs0102, SPs0103, SPs0104, SPs0105, and SPs0106. In a further embodiment, GAS AI-3 includes open reading frames encoding for two or more (i.e., 2, 3, 4, 5, 6, or 7) of orf78, orf79, orf80, orf81, orf82, orf83, and orf84. In yet another embodiment, GAS AI-3 includes open reading frames encoding for two or more (i.e., 2, 3, 4, 5, 6, or 7) of spyM18_{—}0126, spyM18_{—}0127, spyM18_{—}0128, spyM18_{—}0129, spyM18_{—}0130, spyM18_{—}0131, and spyM18_{—}0132. In yet another embodiment, GAS AI-3 includes open reading frames encoding for two or more (i.e., 2, 3, 4, 5, 6, or 7) of SpyoM01000156, SpyoM01000155, SpyoM01000154, SpyoM01000153, SpyoM01000152, SpyoM01000151, SpyoM01000150, and SpyoM01000149.

[0550] Applicants have also identified open reading frames encoding fimbrial structural subunits in other GAS bacteria harbouring an AI-3. These open reading frames encode fimbrial structural subunits ISS3040_fimbrial, ISS3776_fimbrial, and ISS4959_fimbrial. A GAS AI-3 may comprise a polynucleotide encoding any one of ISS3040_fimbrial, ISS3776_fimbrial, and ISS4959_fimbrial.

[0551] One or more of the GAS AI-3 open reading frame polynucleotide sequences may be replaced by a polynucleotide sequence coding for a fragment of the replaced ORF. Alternatively, one or more of the GAS AI-3 open reading frames may be replaced by a sequence having sequence homology to the replaced ORF.

[0552] A preferred immunogenic composition of the invention comprises a GAS AI-3 surface protein which may be formulated or purified in an oligomeric (pilis) form. In a preferred embodiment, the oligomeric form is a hyperoligomer. Another preferred immunogenic composition of the invention comprises a GAS AI-3 surface protein which has been isolated in an oligomeric (pilis) form. The oligomer or hyperoligomeric pilus structures comprising the GAS AI-3 surface proteins may be purified or otherwise formulate for use in immunogenic compositions.

[0553] One or more of the GAS AI-3 surface protein sequences typically include an LPXTG motif (such as LPXTG (SEQ ID NO: 122)) or other sortase substrate motif. The AI surface proteins of the invention may affect the ability of the GAS bacteria to adhere to and invade epithelial cells. AI surface proteins may also affect the ability of GAS to translocate through an epithelial cell layer. Preferably, one or more AI surface proteins are capable of binding to or otherwise associating with an epithelial cell surface. AI surface proteins may also be able to bind to or associate with fibrinogen, fibronectin, or collagen.

[0554] The GAS AI-3 sortase proteins are predicted to be involved in the secretion and anchoring of the LPXTG containing surface proteins. GAS AI-3 may encode for at least one surface protein. Alternatively, GAS AI-3 may encode for at least two surface exposed proteins and at least one sortase. Preferably, GAS AI-3 encodes for at least three surface exposed proteins and at least two sortases.

[0555] The AI surface proteins may be covalently attached to the bacterial cell wall by membrane-associated transpeptidases, such as an AI sortase. The sortase may function to cleave the surface protein, preferably between the threonine and glycine residues of an LPXTG motif. The sortase may then assist in the formation of an amide link between the threonine or alanine carboxyl group and a cell wall precursor such as lipid II. The precursor can then be incorporated into the peptidoglycan via the transglycoslylation and transpeptidation reactions of bacterial wall synthesis. See Comfort et al., Infection & Immunity (2004) 72(5): 2710-2722.

[0556] The invention includes a composition comprising oligomeric, pilus-like structures comprising an AI surface protein such as SpyM3_{—}0098, SpyM3_{—}0100, SpyM3_{—}0102, SpyM3_{—}0104, SPs0100, SPs0102, SPs0104, SPs0106, orf78, orf80, orf82, orf84, spyM18_{—}0126, spyM18_{—}0128, spyM18_{—}0130, spyM18_{—}0132, SpyoM01000155, SpyoM01000153, SpyoM01000151, SpyoM01000149, ISS3040_fimbrial, ISS3776_fimbrial, and ISS4959_fimbrial. In one embodiment, the invention includes a composition comprising oligomeric, pilus-like structures comprising an AI surface protein such as SpyM3_{—}0098, SpyM3_{—}0100, SpyM3_{—}0102, and SpyM3_{—}0104. In another embodiment, the invention includes a composition comprising oligomeric, pilus-like structures comprising an AI surface protein such as SPs0100, SPs0102, SPs0104, and SPs0106. In another embodiment, the invention includes a composition comprising oligomeric, pilus-like structures comprising an AI surface protein such as orf78, orf80, orf82, and orf84. In yet another embodiment, the invention includes a composition comprising oligomeric, pilus-like structures comprising an AI surface protein such as spyM18_{—}0126, spyM18_{—}0128, spyM18_{—}0130, and spyM18_{—}0132. In a further embodiment, the invention includes a composition comprising oligomeric, pilus-like structures comprising an AI surface protein such as SpyoM01000155, SpyoM01000153, SpyoM0000151, and SpyoM1000149. In yet a further embodiment, the invention includes a composition comprising oligomeric, pilus-like structures comprising an AI surface protein such as ISS3040_fimbrial, ISS3776_fimbrial, and ISS4959_fimbrial. The oligomeric, pilus-like structure may comprise numerous units of AI surface protein. Preferably, the oligomeric, pilus-like structures comprise two or more AI surface proteins. Still more preferably, the oligomeric, pilus-like structure comprises a hyper-oligomeric pilus-like structure comprising at least two (e.g., 2, 3, 4, 5, 6, 7, 8, 9, 10, 11, 12, 13, 14, 15, 20, 25, 30, 35, 40, 45, 50, 60, 70, 80, 90, 100, 120, 140, 150, 200 or more) oligomeric subunits, wherein each subunit comprises an AI surface protein or a fragment thereof. The oligomeric subunits may be covalently associated via a conserved lysine within a pilin motif. The oligomeric subunits may be covalently associated via an LPXTG motif, preferably, via the threonine amino acid residue.

[0557] AI surface proteins or fragments thereof to be incorporated into the oligomeric, pilus-like structures of the invention will preferably include a pilin motif.

[0558] The oligomeric, pilus like structures may be used alone or in the combinations of the invention. In one embodiment, the invention comprises a GAS Adhesin Island protein in oligomeric form, preferably in a hyperoligomeric form. In one embodiment, the invention comprises a composition comprising one or more GAS Adhesin Island 3 (“GAS AI-3”) proteins and one or more GAS Adhesin Island 1 (“GAS AI-1”), GAS Adhesin Island 2 (“GAS AI-2”), or GAS Adhesin Island 4 (“GAS AI-4”) proteins, wherein one or more of the Adhesin Island proteins is in the form of an oligomer, preferably in a hyperoligomeric form.

[0559] In addition to the open reading frames encoding the GAS AI-3 proteins, GAS AI-3 may also include a transcriptional regulator such as Nra.

GAS Adhesin Island 4

[0560] A fourth adhesin island, “GAS Adhesin Island 4” or “GAS AI-4” has also been identified in Group A Streptococcus serotypes and isolates. GAS AI-4 comprises a series of approximately eight open reading frames encoding for a collection of amino acid sequences comprising surface proteins and sortases (“GAS AI-4 proteins”). Specifically, GAS AI-4 includes open reading frames encoding for two or more (i.e., 2, 3, 4, 5, 6, 7, or 8) of 19224134, 19224135, 19223136, 19223137, 19224138, 19224139, 19224140, and 19224141.

[0561] Applicants have also identified open reading frames encoding fimbrial structural subunits in other GAS bacteria harbouring an AI-4. These open reading frames encode fimbrial structural subunits 20010296_fimbrial, 20020069_fimbrial, CDC SS 635_fimbrial, ISS4883_fimbrial, and ISS4538_fimbrial. A GAS AI-4 may comprise a polynucleotide encoding any one of 20010296_fimbrial, 20020069_fimbrial, CDC SS 635_fimbrial, ISS4883_fimbrial, and ISS4538_fimbrial.

[0562] One or more of the GAS AI-4 open reading frame polynucleotide sequences may be replaced by a polynucleotide sequence coding for a fragment of the replaced ORF. Alternatively, one or more of the GAS AI-4 open reading frames may be replaced by a sequence having sequence homology to the replaced ORF.

[0563] A preferred immunogenic composition of the invention comprises a GAS AI-4 surface protein which may be formulated or purified in an oligomeric (pilis) form. In a preferred embodiment, the oligomeric form is a hyperoligomer. Another preferred immunogenic composition of the invention comprises a GAS AI-4 surface protein which has been isolated in an oligomeric (pilis) form. The oligomer or hyperoligomeric pilus structures comprising the GAS AI-4 surface proteins may be purified or otherwise formulate for use in immunogenic compositions.

[0564] One or more of the GAS AI-4 surface protein sequences typically include an LPXTG motif (such as LPXTG (SEQ ID NO: 122)) or other sortase substrate motif. The AI surface proteins of the invention may effect the ability of the GAS bacteria to adhere to and invade epithelial cells. AI surface proteins may also affect the ability of GAS to translocate through an epithelial cell layer. Preferably, one or more AI surface proteins are capable of binding to or otherwise associating with an epithelial cell surface. AI surface proteins may also be able to bind to or associate with fibrinogen, fibronectin, or collagen.

[0565] The GAS AI-4 sortase proteins are predicted to be involved in the secretion and anchoring of the LPXTG containing surface proteins. GAS AI-4 may encode for at least one surface protein. Alternatively, GAS AI-4 may encode for at least two surface exposed proteins and at least one sortase. Preferably, GAS AI-4 encodes for at least three surface exposed proteins and at least two sortases.

[0566] The AI surface proteins may be covalently attached to the bacterial cell wall by membrane-associated transpeptidases, such as an AI sortase. The sortase may function to cleave the surface protein, preferably between the threonine and glycine residues of an LPXTG motif. The sortase may then assist in the formation of an amide link between the threonine carboxyl group and a cell wall precursor such as lipid II. The precursor can then be incorporated into the peptidoglycan via the transglycoslylation and transpeptidation reactions of bacterial wall synthesis. See Comfort et al., Infection & Immunity (2004) 72(5): 2710-2722.

[0567] In one embodiment, the invention includes a composition comprising oligomeric, pilus-like structures comprising an AI surface protein such as 19224134, 19224135, 19224137, 19224139, 19224141, 20010296_fimbrial, 20020069_fimbrial, CDC SS 635_fimbrial, ISS4883_fimbrial, and ISS4538_fimbrial. The oligomeric, pilus-like structure may comprise numerous units of AI surface protein. Preferably, the oligomeric, pilus-like structures comprise two or more AI surface proteins. Still more preferably, the oligomeric, pilus-like structure comprises a hyper-oligomeric pilus-like structure comprising at least two (e.g., 2, 3, 4, 5, 6, 7, 8, 9, 10, 11, 12, 13, 14, 15, 20, 25, 30, 35, 40, 45, 50, 60, 70, 80, 90, 100, 120, 140, 150, 200 or more) oligomeric subunits, wherein each subunit comprises an AI surface protein or a fragment thereof. The oligomeric subunits may be covalently associated via a conserved lysine within a pilin motif. The oligomeric subunits may be covalently associated via an LPXTG motif, preferably, via the threonine amino acid residue.

[0568] AI surface proteins or fragments thereof to be incorporated into the oligomeric, pilus-like structures of the invention will preferably include a pilin motif.

[0569] The oligomeric, pilus like structures may be used alone or in the combinations of the invention. In one embodiment, the invention comprises a GAS Adhesin Island protein in oligomeric form, preferably in a hyperoligomeric form. In one embodiment, the invention comprises a composition comprising one or more GAS Adhesin Island 4 (“GAS AI-4”) proteins and one or more GAS Adhesin Island 1 (“GAS AI-1”), GAS Adhesin Island 2 (“GAS AI-2”), or GAS Adhesin Island 3 (“GAS AI-3”) proteins, wherein one or more of the Adhesin Island proteins is in the form of an oligomer, preferably in a hyperoligomeric form.

[0570] In addition to the open reading frames encoding the GAS AI-4 proteins, GAS AI-4 may also include a divergently transcribed transcriptional regulator such as rofA (i.e., the transcriptional regulator is located near or adjacent to the AI protein open reading frames, but it transcribed in the opposite direction).

[0571] The oligomeric, pilus-like structures of the invention may be combined with one or more additional GAS proteins. In one embodiment, the oligomeric, pilus-like structures comprise one or more AI surface proteins in combination with a second GAS protein.

[0572] The oligomeric, pilus-like structures may be isolated or purified from bacterial cultures in which the bacteria express an AI surface protein. The invention therefore includes a method for manufacturing an oligomeric AI surface antigen comprising culturing a GAS bacterium that expresses the oligomeric AI protein and isolating the expressed oligomeric AI protein from the GAS bacteria. The AI protein may be collected from secretions into the supernatant or it may be purified from the bacterial surface. The method may further comprise purification of the expressed AI protein. Preferably, the AI protein is in a hyperoligomeric form.

[0573] The oligomeric, pilus-like structures may be isolated or purified from bacterial cultures overexpressing an AI surface protein. The invention therefore includes a method for manufacturing an oligomeric Adhesin Island surface antigen comprising culturing a GAS bacterium adapted for increased AI protein expression and isolation of the expressed oligomeric Adhesin Island protein from the GAS bacteria. The AI protein may be collected from secretions into the supernatant or it may be purified from the bacterial surface. The method may further comprise purification of the expressed Adhesin Island protein. Preferably, the Adhesin Island protein is in a hyperoligomeric form.

[0574] The GAS bacteria are preferably adapted to increase AI protein expression by at least two (e.g., 2, 3, 4, 5, 8, 10, 15, 20, 25, 30, 35, 40, 45, 50, 60, 70, 80, 90, 100, 125, 150 or 200) times wild type expression levels.

[0575] GAS bacteria may be adapted to increase AI protein expression by any means known in the art, including methods of increasing gene dosage and methods of gene upregulation. Such means include, for example, transformation of the GAS bacteria with a plasmid encoding the AI protein. The plasmid may include a strong promoter or it may include multiple copies of the sequence encoding the AI protein. Optionally, the sequence encoding the AI protein within the GAS bacterial genome may be deleted. Alternatively, or in addition, the promoter regulating the GAS Adhesin Island may be modified to increase expression.

[0576] The invention further includes GAS bacteria which have been adapted to produce increased levels of AI surface protein. In particular, the invention includes GAS bacteria which have been adapted to produce oligomeric or hyperoligomeric AI surface protein. In one embodiment, the Gram positive bacteria of the invention are inactivated or attenuated to permit in vivo delivery of the whole bacteria, with the AI surface protein exposed on its surface.

[0577] The invention further includes GAS bacteria which have been adapted to have increased levels of expressed AI protein incorporated in pili on their surface. The GAS bacteria may be adapted to have increased exposure of oligomeric or hyperoligomeric AI proteins on its surface by increasing expression levels of LepA polypeptide, or an equivalent signal peptidase, in the GAS bacteria. Applicants have shown that deletion of LepA in strain SF370 bacteria, which harbour a GAS AI-2, abolishes surface exposure of M and pili proteins on the GAS. Increased levels of LepA expression in GAS are expected to result in increased exposure of M and pili proteins on the surface of GAS. Increased expression of LepA in GAS may be achieved by any means known in the art, such as increasing gene dosage and methods of gene upregulation. The GAS bacteria adapted to have increased levels of LepA expression may additionally be adapted to express increased levels of at least one pili protein.

[0578] Alternatively, the AI proteins of the invention may be expressed on the surface of a non-pathogenic Gram positive bacteria, such as Streptococus gordonii (See, e.g., Byrd et al., “Biological consequences of antigen and cytokine co-expression by recombinant Streptococcus gordonii vaccine vectors”, Vaccine (2002) 20:2197-2205) or Lactococcus lactis (See, e.g., Mannam et al., “Mucosal Vaccine Made from Live, Recombinant Lactococcus lactis Protects Mice against Pharangeal Infection with Streptococcus pyogenes” Infection and Immunity (2004) 72(6):3444-3450). As used herein, non-pathogenic Gram positive bacteria refer to Gram positive bacteria which are compatible with a human host subject and are not associated with human pathogenisis. Preferably, the non-pathogenic bacteria are modified to express the AI surface protein in oligomeric, or hyper-oligomeric form. Sequences encoding for an AI surface protein and, optionally, an AI sortase, may be integrated into the non-pathogenic Gram positive bacterial genome or inserted into a plasmid. The non-pathogenic Gram positive bacteria may be inactivated or attenuated to facilitate in vivo delivery of the whole bacteria, with the AI surface protein exposed on its surface. Alternatively, the AI surface protein may be isolated or purified from a bacterial culture of the non-pathogenic Gram positive bacteria. For example, the AI surface protein may be isolated from cell extracts or culture supernatants. Alternatively, the AI surface protein may be isolated or purified from the surface of the non-pathogenic Gram positive bacteria.

[0579] The non-pathogenic Gram positive bacteria may be used to express any of the GAS Adhesin Island proteins described herein. The non-pathogenic Gram positive bacteria are transformed to express an Adhesin Island surface protein. Preferably, the non-pathogenic Gram positive bacteria also express at least one Adhesin Island sortase. The AI transformed non-pathogenic Gram positive bacteria of the invention may be used to prevent or treat infection with pathogenic GAS.

[0580] Applicants modified L. lactis to demonstrate that, like GBS polypeptides, it can express GAS AI polypeptides. L. lactis was transformed with pAM401 constructs encoding entire pili gene clusters of AI-1, AI-2, and AI-4 adhesin islands. Briefly, the pAM401 is a promoterless high-copy plasmid. The entire pili gene clusters of an M6 (AI-1), M1 (AI-2), and M12 (AI-4) bacteria were inserted into the pAM401 construct. The gene clusters were transcribed under the control their own (M6, M1, or M12) promoter or the GBS promoter that successfully initiated expression of the GBS AI-1 adhesin islands in L. lactis, described above. FIG. 172 provides a schematic depiction of GAS M6 (AI-1), M1 (AI-2), and M12 (AI-4) adhesin islands and indicates the portions of the adhesin island sequences inserted in the pAM401 construct.

[0581] Each of the L. lactis transformed with one of the M6, M1, or M12 adhesin island gene clusters expressed high molecular weight structures that were immunoreactive with antibodies that bind to polypeptides present in their respective pili. FIGS. 173 A-C provide results of Western blot analysis of surface protein-enriched extracts of L. lactis transformed with M6 (FIG. 173 A), M1 (FIG. 173 B), or M12 (FIG. 173 C) adhesin island gene clusters using antibodies that bind to the fimbrial structural subunit encoded by each cluster. FIG. 173A at lanes 3 and 4 shows detection of high molecular structures in L. lactis transformed with an adhesin island pilus gene cluster from an M1 AI-2 using an antibody that binds to fimbrial structural subunit Spy0128. FIG. 173B at lanes 3 and 4 shows detection of high molecular weight structures in L. lactis transformed with an adhesin island pilus gene cluster from an M12 AI-4 using an antibody that binds to fimbrial structural subunit EftLSL.A. FIG. 173C at lane 3 shows detection of high molecular weight structures in L. lactis transformed with an adhesin island pilus gene cluster from an M6 AI-1 using an antibody that binds to fimbrial structural subunit M6_Spy0160. In FIGS. 173 A-C, “p1” immediately following the notation of AI subtype indicates that the promoter present in the Adhesin Island is used to drive transcription of the adhesin island gene cluster and “p2” indicates that the promoter was the GBS promoter described above. Thus, it appears that L. lactis is capable of expressing the fimbrial structural subunits encoded by GAS adhesin islands in an oligomeric form.

[0582] Alternatively, the oligomeric, pilus-like structures may be produced recombinantly. If produced in a recombinant host cell system, the AI surface protein will preferably be expressed in coordination with the expression of one or more of the AI sortases of the invention. Such AI sortases will facilitate oligomeric or hyperoligomeric formation of the AI surface protein subunits.

S. pneumoniae from TIGR4 Adhesin Island

[0583] As discussed above, Applicants have identified adhesin islands within the genome of S. pneumoniae from TIGR4. The S. pneumoniae from TIGR4 Adhesin Island comprises a series of approximately seven open reading frames encoding for a collection of amino acid sequences comprising surface proteins and sortases. Specifically, the S. pneumoniae from TIGR4 AI proteins includes open reading frames encoding for two or more (i.e., 2, 3, 4, 5, 6, or 7) of SP0462, SP0463, SP0464, SP0465, SP0466, SP0467, and SP0468.

[0584] A preferred immunogenic composition of the invention comprises a S. pneumoniae from TIGR4 AI surface protein which may be formulated or purified in an oligomeric (pilis) form. In a preferred embodiment, the oligomeric form is a hyperoligomer. Another preferred immunogenic composition of the invention comprises a S. pneumoniae from TIGR4 AI surface protein which has been isolated in an oligomeric (pilis) form. The oligomer or hyperoligomer pilus structures comprising S. pneumoniae surface proteins may be purified or otherwise formulated for use in immunogenic compositions.

[0585] One or more of the S. pneumoniae from TIGR4 AI open reading frame polynucleotide sequences may be replaced by a polynucleotide sequence coding for a fragment of the replaced ORF. Alternatively, one or more of the S. pneumoniae from TIGR4 AI open reading frames may be replaced by a sequence having sequence homology to the replaced ORF.

[0586] One or more of the S. pneumoniae from TIGR4 AI surface protein sequences typically include an LPXTG motif (such as LPXTG (SEQ ID NO: 122)) or other sortase substrate motif.

[0587] The S. pneumoniae from TIGR4 AI surface proteins of the invention may affect the ability of the S. pneumoniae bacteria to adhere to and invade epithelial cells. AI surface proteins may also affect the ability of S. pneumoniae to translocate through an epithelial cell layer. Preferably, one or more S. pneumoniae from TIGR4 AI surface proteins are capable of binding to or otherwise associating with an epithelial cell surface. S. pneumoniae from TIGR4 AI surface proteins may also be able to bind to or associate with fibrinogen, fibronectin, or collagen.

[0588] The S. pneumoniae from TIGR4 AI sortase proteins are predicted to be involved in the secretion and anchoring of the LPXTG containing surface proteins. S. pneumoniae from TIGR4 AI may encode for at least one surface protein. Alternatively, S. pneumoniae from TIGR4 AI may encode for at least two surface exposed proteins and at least one sortase. Preferably, S. pneumoniae from TIGR4 AI encodes for at least three surface exposed proteins and at least two sortases.

[0589] The AI surface proteins may be covalently attached to the bacterial cell wall by membrane-associated transpeptidases, such as an AI sortase. The sortase may function to cleave the surface protein, preferably between the threonine and glycine residues of an LPXTG motif. The sortase may then assist in the formation of an amide link between the threonine carboxyl group and a cell wall precursor such as lipid II. The precursor can then be incorporated into the peptidoglycan via the transglycoslylation and transpeptidation reactions of bacterial wall synthesis. See Comfort et al., Infection & Immunity (2004) 72(5): 2710-2722.

[0590] In one embodiment, the invention includes a composition comprising oligomeric, pilus-like structures comprising a S. pneumoniae from TIGR4 AI surface protein such as SP0462, SP0463, SP0464, or SP0465. The oligomeric, pilus-like structure may comprise numerous units of AI surface protein. Preferably, the oligomeric, pilus-like structures comprise two or more AI surface proteins. Still more preferably, the oligomeric, pilus-like structure comprises a hyper-oligomeric pilus-like structure comprising at least two (e.g., 2, 3, 4, 5, 6, 7, 8, 9, 10, 11, 12, 13, 14, 15, 20, 25, 30, 35, 40, 45, 50, 60, 70, 80, 90, 100, 120, 140, 150, 200 or more) oligomeric subunits, wherein each subunit comprises an AI surface protein or a fragment thereof. The oligomeric subunits may be covalently associated via a conserved lysine within a pilin motif. The oligomeric subunits may be covalently associated via an LPXTG motif, preferably, via the threonine or serine amino acid residue, respectively.

[0591] AI surface proteins or fragments thereof to be incorporated into the oligomeric, pilus-like structures of the invention will preferably include a pilin motif.

[0592] The oligomeric, pilus like structures may be used alone or in the combinations of the invention. In one embodiment, the invention comprises a S. pneumoniae from TIGR4 AI protein in oligomeric form, preferably in a hyperoligomeric form. In one embodiment, the invention comprises a composition comprising one or more S. pneumoniae from TIGR4 AI proteins and one or more S. pneumoniae strain 670 AI proteins, wherein one or more of the S. pneumoniae AI proteins is in the form of an oligomer, preferably in a hyperoligomeric form.

[0593] In addition to the open reading frames encoding the S. pneumoniae from TIGR4 AI proteins, S. pneumoniae from TIGR4 AI may also include a transcriptional regulator.

S. pneumoniae Strain 670 Adhesin Island

[0594] As discussed above, Applicants have identified adhesin islands within the genome of S. pneumoniae strain 670. The S. pneumoniae strain 670 Adhesin Island comprises a series of approximately seven open reading frames encoding for a collection of amino acid sequences comprising surface proteins and sortases. Specifically, the S. pneumoniae strain 670 AI proteins includes open reading frames encoding for two or more (i.e., 2, 3, 4, 5, 6, or 7) of orf1_{—}670, orf3_{—}670, orf4_{—}670, orf5_{—}670, orf6_{—}670, orf7_{—}670, orf8_{—}670.

[0595] A preferred immunogenic composition of the invention comprises a S. pneumoniae strain 670 AI surface protein which may be formulated or purified in an oligomeric (pilis) form. Another preferred immunogenic composition of the invention comprises a S. pneumoniae strain 670 AI surface protein which has been isolated in an oligomeric (pilis) form.

[0596] One or more of the S. pneumoniae strain 670 AI open reading frame polynucleotide sequences may be replaced by a polynucleotide sequence coding for a fragment of the replaced ORF. Alternatively, one or more of the S. pneumoniae strain 670 AI open reading frames may be replaced by a sequence having sequence homology to the replaced ORF.

[0597] One or more of the S. pneumoniae strain 670 AI surface protein sequences typically include an LPXTG motif (such as LPXTG (SEQ ID NO: 122)) or other sortase substrate motif.

[0598] The S. pneumoniae strain 670 AI surface proteins of the invention may affect the ability of the S. pneumoniae bacteria to adhere to and invade epithelial cells. AI surface proteins may also affect the ability of S. pneumoniae to translocate through an epithelial cell layer. Preferably, one or more S. pneumoniae strain 670 AI surface proteins are capable of binding to or otherwise associating with an epithelial cell surface. S. pneumoniae strain 670 AI surface proteins may also be able to bind to or associate with fibrinogen, fibronectin, or collagen.

[0599] The S. pneumoniae strain 670 AI sortase proteins are predicted to be involved in the secretion and anchoring of the LPXTG containing surface proteins. S. pneumoniae strain 670 AI may encode for at least one surface protein. Alternatively, S. pneumoniae strain 670 AI may encode for at least two surface exposed proteins and at least one sortase. Preferably, S. pneumoniae strain 670 AI encodes for at least three surface exposed proteins and at least two sortases.

[0600] The AI surface proteins may be covalently attached to the bacterial cell wall by membrane-associated transpeptidases, such as an AI sortase. The sortase may function to cleave the surface protein, preferably between the threonine and glycine residues of an LPXTG motif. The sortase may then assist in the formation of an amide link between the threonine carboxyl group and a cell wall precursor such as lipid II. The precursor can then be incorporated into the peptidoglycan via the transglycoslylation and transpeptidation reactions of bacterial wall synthesis. See Comfort et al., Infection & Immunity (2004) 72(5): 2710-2722.

[0601] In one embodiment, the invention includes a composition comprising oligomeric, pilus-like structures comprising a S. pneumoniae strain 670 AI surface protein such as orf3_{—}670, orf4_{—}670, or orf5_{—}670. The oligomeric, pilus-like structure may comprise numerous units of AI surface protein. Preferably, the oligomeric, pilus-like structures comprise two or more AI surface proteins. Still more preferably, the oligomeric, pilus-like structure comprises a hyper-oligomeric pilus-like structure comprising at least two (e.g., 2, 3, 4, 5, 6, 7, 8, 9, 10, 11, 12, 13, 14, 15, 20, 25, 30, 35, 40, 45, 50, 60, 70, 80, 90, 100, 120, 140, 150, 200 or more) oligomeric subunits, wherein each subunit comprises an AI surface protein or a fragment thereof. The oligomeric subunits may be covalently associated via a conserved lysine within a pilin motif. The oligomeric subunits may be covalently associated via an LPXTG motif, preferably, via the threonine or serine amino acid residue, respectively.

[0602] AI surface proteins or fragments thereof to be incorporated into the oligomeric, pilus-like structures of the invention will preferably include a pilin motif.

[0603] The oligomeric, pilus like structures may be used alone or in the combinations of the invention. In one embodiment, the invention comprises a S. pneumoniae strain 670 AI protein in oligomeric form, preferably in a hyperoligomeric form. In one embodiment, the invention comprises a composition comprising one or more S. pneumoniae strain 670 AI proteins and one or more S. pneumoniae from TIGR4 AI proteins, wherein one or more of the S. pneumoniae AI proteins is in the form of an oligomer, preferably in a hyperoligomeric form.

[0604] In addition to the open reading frames encoding the S. pneumoniae strain 670 AI proteins, S. pneumoniae strain 670 AI may also include a transcriptional regulator.

S. pneumoniae strain 14 CSR 10 Adhesin Island

[0605] As discussed above, Applicants have identified adhesin islands within the genome of S. pneumoniae strain 14 CSR 10. The S. pneumoniae strain 14 CSR 10 Adhesin Island comprises a series of approximately seven open reading frames encoding for a collection of amino acid sequences comprising surface proteins and sortases. Specifically, the S. pneumoniae strain 14 CSR 10 AI proteins includes open reading frames encoding for two or more (i.e., 2, 3, 4, 5, 6, or 7) of ORF2_{—}14CSR, ORF3_{—}14CSR, ORF4_{—}14CSR, ORF5_{—}14CSR, ORF6_{—}14CSR, ORF7_{—}14CSR, ORF8_{—}14CSR.

[0606] A preferred immunogenic composition of the invention comprises a S. pneumoniae strain 14 CSR 10 AI surface protein which may be formulated or purified in an oligomeric (pilis) form. Another preferred immunogenic composition of the invention comprises a S. pneumoniae strain 14 CSR 10 AI surface protein which has been isolated in an oligomeric (pilis) form.

[0607] One or more of the S. pneumoniae strain 14 CSR 10 AI open reading frame polynucleotide sequences may be replaced by a polynucleotide sequence coding for a fragment of the replaced ORF. Alternatively, one or more of the S. pneumoniae strain 14 CSR 10 AI open reading frames may be replaced by a sequence having sequence homology to the replaced ORF.

[0608] One or more of the S. pneumoniae strain 14 CSR 10 AI surface protein sequences typically include an LPXTG motif (such as LPXTG (SEQ ID NO: 122)) or other sortase substrate motif.

[0609] The S. pneumoniae strain 14 CSR 10 AI surface proteins of the invention may affect the ability of the S. pneumoniae bacteria to adhere to and invade epithelial cells. AI surface proteins may also affect the ability of S. pneumoniae to translocate through an epithelial cell layer. Preferably, one or more S. pneumoniae strain 14 CSR 10 AI surface proteins are capable of binding to or otherwise associating with an epithelial cell surface. S. pneumoniae strain 14 CSR 10 AI surface proteins may also be able to bind to or associate with fibrinogen, fibronectin, or collagen.

[0610] The S. pneumoniae strain 14 CSR 10 AI sortase proteins are predicted to be involved in the secretion and anchoring of the LPXTG containing surface proteins. S. pneumoniae strain 14 CSR 10 AI may encode for at least one surface protein. Alternatively, S. pneumoniae strain 14 CSR 10 AI may encode for at least two surface exposed proteins and at least one sortase. Preferably, S. pneumoniae strain 14 CSR 10 AI encodes for at least three surface exposed proteins and at least two sortases.

[0611] The AI surface proteins may be covalently attached to the bacterial cell wall by membrane-associated transpeptidases, such as an AI sortase. The sortase may function to cleave the surface protein, preferably between the threonine and glycine residues of an LPXTG motif. The sortase may then assist in the formation of an amide link between the threonine carboxyl group and a cell wall precursor such as lipid II. The precursor can then be incorporated into the peptidoglycan via the transglycoslylation and transpeptidation reactions of bacterial wall synthesis. See Comfort et al., Infection & Immunity (2004) 72(5): 2710-2722.

[0612] In one embodiment, the invention includes a composition comprising oligomeric, pilus-like structures comprising a S. pneumoniae strain 14 CSR 10 AI surface protein such as orf3_CSR, orf4_CSR, or orf5_CSR. The oligomeric, pilus-like structure may comprise numerous units of AI surface protein. Preferably, the oligomeric, pilus-like structures comprise two or more AI surface proteins. Still more preferably, the oligomeric, pilus-like structure comprises a hyper-oligomeric pilus-like structure comprising at least two (e.g., 2, 3, 4, 5, 6, 7, 8, 9, 10, 11, 12, 13, 14, 15, 20, 25, 30, 35, 40, 45, 50, 60, 70, 80, 90, 100, 120, 140, 150, 200 or more) oligomeric subunits, wherein each subunit comprises an AI surface protein or a fragment thereof. The oligomeric subunits may be covalently associated via a conserved lysine within a pilin motif. The oligomeric subunits may be covalently associated via an LPXTG motif, preferably, via the threonine or serine amino acid residue, respectively.

[0613] AI surface proteins or fragments thereof to be incorporated into the oligomeric, pilus-like structures of the invention will preferably include a pilin motif.

[0614] The oligomeric, pilus like structures may be used alone or in the combinations of the invention. In one embodiment, the invention comprises a S. pneumoniae strain 14 CSR 10 AI protein in oligomeric form, preferably in a hyperoligomeric form. In one embodiment, the invention comprises a composition comprising one or more S. pneumoniae strain 14 CSR 10 AI proteins, and one or more AI proteins of any of S. pneumoniae from TIGR4, 670, 19A Hungary 6, 6B Finland 12, 6B Spain 2, 9V Spain 3, 19F Taiwan 14, 23F Taiwan 15, or 23F Poland 16, wherein one or more of the S. pneumoniae AI proteins is in the form of an oligomer, preferably in a hyperoligomeric form.

[0615] In addition to the open reading frames encoding the S. pneumoniae strain 14 CSR 10 AI proteins, S. pneumoniae strain 14 CSR 10 AI may also include a transcriptional regulator.

S. pneumoniae Strain 19A Hungary 6 Adhesin Island

[0616] As discussed above, Applicants have identified adhesin islands within the genome of S. pneumoniae strain 19A Hungary 6. The S. pneumoniae strain 19A Hungary 6 Adhesin Island comprises a series of approximately seven open reading frames encoding for a collection of amino acid sequences comprising surface proteins and sortases. Specifically, the S. pneumoniae strain 19A Hungary 6 AI proteins includes open reading frames encoding for two or more (i.e., 2, 3, 4, 5, 6, or 7) of ORF2_{—}19AH, ORF3_{—}19AH, ORF4_{—}19AH, ORF5_{—}1 gAH, ORF6_{—}1 gAH, ORF7_{—}19AH, ORF8_{—}19AH.

[0617] A preferred immunogenic composition of the invention comprises a S. pneumoniae strain 19A Hungary 6 AI surface protein which may be formulated or purified in an oligomeric (pilis) form. Another preferred immunogenic composition of the invention comprises a S. pneumoniae strain 19A Hungary 6 AI surface protein which has been isolated in an oligomeric (pilis) form.

[0618] One or more of the S. pneumoniae strain 19A Hungary 6 AI open reading frame polynucleotide sequences may be replaced by a polynucleotide sequence coding for a fragment of the replaced ORF. Alternatively, one or more of the S. pneumoniae strain 19A Hungary 6 AI open reading frames may be replaced by a sequence having sequence homology to the replaced ORF.

[0619] One or more of the S. pneumoniae strain 19A Hungary 6 AI surface protein sequences typically include an LPXTG motif (such as LPXTG (SEQ ID NO: 122)) or other sortase substrate motif.

[0620] The S. pneumoniae strain 19A Hungary 6 AI surface proteins of the invention may affect the ability of the S. pneumoniae bacteria to adhere to and invade epithelial cells. AI surface proteins may also affect the ability of S. pneumoniae to translocate through an epithelial cell layer. Preferably, one or more S. pneumoniae strain 19A Hungary 6 AI surface proteins are capable of binding to or otherwise associating with an epithelial cell surface. S. pneumoniae strain 19A Hungary 6 AI surface proteins may also be able to bind to or associate with fibrinogen, fibronectin, or collagen.

[0621] The S. pneumoniae strain 19A Hungary 6 AI sortase proteins are predicted to be involved in the secretion and anchoring of the LPXTG containing surface proteins. S. pneumoniae strain 19A Hungary 6 AI may encode for at least one surface protein. Alternatively, S. pneumoniae strain 19A Hungary 6 AI may encode for at least two surface exposed proteins and at least one sortase. Preferably, S. pneumoniae strain 19A Hungary 6 AI encodes for at least three surface exposed proteins and at least two sortases.

[0622] The AI surface proteins may be covalently attached to the bacterial cell wall by membrane-associated transpeptidases, such as an AI sortase. The sortase may function to cleave the surface protein, preferably between the threonine and glycine residues of an LPXTG motif. The sortase may then assist in the formation of an amide link between the threonine carboxyl group and a cell wall precursor such as lipid II. The precursor can then be incorporated into the peptidoglycan via the transglycoslylation and transpeptidation reactions of bacterial wall synthesis. See Comfort et al., Infection & Immunity (2004) 72(5): 2710-2722.

[0623] In one embodiment, the invention includes a composition comprising oligomeric, pilus-like structures comprising a S. pneumoniae strain 19A Hungary 6 AI surface protein such as orf3_{—}19AH, orf4_{—}19AH, or orf5_{—}19AH. The oligomeric, pilus-like structure may comprise numerous units of AI surface protein. Preferably, the oligomeric, pilus-like structures comprise two or more AI surface proteins. Still more preferably, the oligomeric, pilus-like structure comprises a hyper-oligomeric pilus-like structure comprising at least two (e.g., 2, 3, 4, 5, 6, 7, 8, 9, 10, 11, 12, 13, 14, 15, 20, 25, 30, 35, 40, 45, 50, 60, 70, 80, 90, 100, 120, 140, 150, 200 or more) oligomeric subunits, wherein each subunit comprises an AI surface protein or a fragment thereof. The oligomeric subunits may be covalently associated via a conserved lysine within a pilin motif. The oligomeric subunits may be covalently associated via an LPXTG motif, preferably, via the threonine or serine amino acid residue, respectively.

[0624] AI surface proteins or fragments thereof to be incorporated into the oligomeric, pilus-like structures of the invention will preferably include a pilin motif.

[0625] The oligomeric, pilus like structures may be used alone or in the combinations of the invention. In one embodiment, the invention comprises a S. pneumoniae strain 19A Hungary 6 AI protein in oligomeric form, preferably in a hyperoligomeric form. In one embodiment, the invention comprises a composition comprising one or more S. pneumoniae strain 19A Hungary 6 AI proteins and one or more AI proteins from one of any one of S. pneumoniae from TIGR4, 670, 14 CSR 10, 6B Finland 12, 6B Spain 2, 9V Spain 3, 19F Taiwan 14, 23F Taiwan 15, or 23F Poland 16 AI GR4 AI proteins, wherein one or more of the S. pneumoniae AI proteins is in the form of an oligomer, preferably in a hyperoligomeric form.

[0626] In addition to the open reading frames encoding the S. pneumoniae strain 19A Hungary 6 AI proteins, S. pneumoniae strain 19A Hungary 6 AI may also include a transcriptional regulator.

S. pneumoniae Strain 19F Taiwan 14 Adhesin Island

[0627] As discussed above, Applicants have identified adhesin islands within the genome of S. pneumoniae strain 19F Taiwan 14. The S. pneumoniae strain 19F Taiwan 14 Adhesin Island comprises a series of approximately seven open reading frames encoding for a collection of amino acid sequences comprising surface proteins and sortases. Specifically, the S. pneumoniae strain 19F Taiwan 14 AI proteins includes open reading frames encoding for two or more (i.e., 2, 3, 4, 5, 6, or 7) of ORF2_{—}19FTW, ORF3_{—}19FTW, ORF4_{—}19FTW, ORF5_{—}19FTW, ORF6_{—}19FTW, ORF7_{—}19FTW, ORF8_{—}19FTW.

[0628] A preferred immunogenic composition of the invention comprises a S. pneumoniae strain 19F Taiwan 14 AI surface protein which may be formulated or purified in an oligomeric (pilis) form. Another preferred immunogenic composition of the invention comprises a S. pneumoniae strain 19F Taiwan 14 AI surface protein which has been isolated in an oligomeric (pilis) form.

[0629] One or more of the S. pneumoniae strain 19F Taiwan 14 AI open reading frame polynucleotide sequences may be replaced by a polynucleotide sequence coding for a fragment of the replaced ORF. Alternatively, one or more of the S. pneumoniae strain 19F Taiwan 14 AI open reading frames may be replaced by a sequence having sequence homology to the replaced ORF.

[0630] One or more of the S. pneumoniae strain 19F Taiwan 14 AI surface protein sequences typically include an LPXTG motif (such as LPXTG (SEQ ID NO: 122)) or other sortase substrate motif.

[0631] The S. pneumoniae strain 19F Taiwan 14 AI surface proteins of the invention may affect the ability of the S. pneumoniae bacteria to adhere to and invade epithelial cells. AI surface proteins may also affect the ability of S. pneumoniae to translocate through an epithelial cell layer. Preferably, one or more S. pneumoniae strain 19F Taiwan 14 AI surface proteins are capable of binding to or otherwise associating with an epithelial cell surface. S. pneumoniae strain 19F Taiwan 14 AI surface proteins may also be able to bind to or associate with fibrinogen, fibronectin, or collagen.

[0632] The S. pneumoniae strain 19F Taiwan 14 AI sortase proteins are predicted to be involved in the secretion and anchoring of the LPXTG containing surface proteins. S. pneumoniae strain 19F Taiwan 14 μl may encode for at least one surface protein. Alternatively, S. pneumoniae strain 19F Taiwan 14 AI may encode for at least two surface exposed proteins and at least one sortase. Preferably, S. pneumoniae strain 19F Taiwan 14 AI encodes for at least three surface exposed proteins and at least two sortases.

[0633] The AI surface proteins may be covalently attached to the bacterial cell wall by membrane-associated transpeptidases, such as an AI sortase. The sortase may function to cleave the surface protein, preferably between the threonine and glycine residues of an LPXTG motif. The sortase may then assist in the formation of an amide link between the threonine carboxyl group and a cell wall precursor such as lipid II. The precursor can then be incorporated into the peptidoglycan via the transglycoslylation and transpeptidation reactions of bacterial wall synthesis. See Comfort et al., Infection & Immunity (2004) 72(5): 2710-2722.

[0634] In one embodiment, the invention includes a composition comprising oligomeric, pilus-like structures comprising a S. pneumoniae strain 19F Taiwan 14 AI surface protein such as orf3_{—}19FTW, orf4_{—}19FTW, or orf5_{—}19FTW. The oligomeric, pilus-like structure may comprise numerous units of AI surface protein. Preferably, the oligomeric, pilus-like structures comprise two or more AI surface proteins. Still more preferably, the oligomeric, pilus-like structure comprises a hyper-oligomeric pilus-like structure comprising at least two (e.g., 2, 3, 4, 5, 6, 7, 8, 9, 10, 11, 12, 13, 14, 15, 20, 25, 30, 35, 40, 45, 50, 60, 70, 80, 90, 100, 120, 140, 150, 200 or more) oligomeric subunits, wherein each subunit comprises an AI surface protein or a fragment thereof. The oligomeric subunits may be covalently associated via a conserved lysine within a pilin motif. The oligomeric subunits may be covalently associated via an LPXTG motif, preferably, via the threonine or serine amino acid residue, respectively.

[0635] AI surface proteins or fragments thereof to be incorporated into the oligomeric, pilus-like structures of the invention will preferably include a pilin motif.

[0636] The oligomeric, pilus like structures may be used alone or in the combinations of the invention. In one embodiment, the invention comprises a S. pneumoniae strain 19F Taiwan 14 AI protein in oligomeric form, preferably in a hyperoligomeric form. In one embodiment, the invention comprises a composition comprising one or more S. pneumoniae strain 19F Taiwan 14 AI proteins and one or more AI proteins of any one or more of S. pneumoniae from TIGR4, 670, 19A Hungary 6, 6B Finland 12, 6B Spain 2, 9V Spain 3, 14 CSR 10, 23F Taiwan 15, or 23F Poland 16, wherein one or more of the S. pneumoniae AI proteins is in the form of an oligomer, preferably in a hyperoligomeric form.

[0637] In addition to the open reading frames encoding the S. pneumoniae strain 19F Taiwan 14 AI proteins, S. pneumoniae strain 19F Taiwan 14 AI may also include a transcriptional regulator.

S. pneumoniae Strain 23F Poland 16 Adhesin Island

[0638] As discussed above, Applicants have identified adhesin islands within the genome of S. pneumoniae strain 23F Poland 16. The S. pneumoniae strain 23F Poland 16 Adhesin Island comprises a series of approximately seven open reading frames encoding for a collection of amino acid sequences comprising surface proteins and sortases. Specifically, the S. pneumoniae strain 23F Poland 16 AI proteins includes open reading frames encoding for two or more (i.e., 2, 3, 4, 5, 6, or 7) of ORF2_{—}23FP, ORF3_{—}23FP, ORF4_{—}23FP, ORF5_{—}23FP, ORF6_{—}23FP, ORF7_{—}23FP, and ORF8_{—}23FP.

[0639] A preferred immunogenic composition of the invention comprises a S. pneumoniae strain 23F Poland 16 AI surface protein which may be formulated or purified in an oligomeric (pilis) form. Another preferred immunogenic composition of the invention comprises a S. pneumoniae strain 23F Poland 16 AI surface protein which has been isolated in an oligomeric (pilis) form.

[0640] One or more of the S. pneumoniae strain 23F Poland 16 AI open reading frame polynucleotide sequences may be replaced by a polynucleotide sequence coding for a fragment of the replaced ORF. Alternatively, one or more of the S. pneumoniae strain 23F Poland 16 AI open reading frames may be replaced by a sequence having sequence homology to the replaced ORF.

[0641] One or more of the S. pneumoniae strain 23F Poland 16 AI surface protein sequences typically include an LPXTG motif (such as LPXTG (SEQ ID NO: 122)) or other sortase substrate motif.

[0642] The S. pneumoniae strain 23F Poland 16 AI surface proteins of the invention may affect the ability of the S. pneumoniae bacteria to adhere to and invade epithelial cells. AI surface proteins may also affect the ability of S. pneumoniae to translocate through an epithelial cell layer. Preferably, one or more S. pneumoniae strain 23F Poland 16 AI surface proteins are capable of binding to or otherwise associating with an epithelial cell surface. S. pneumoniae strain 23F Poland 16 AI surface proteins may also be able to bind to or associate with fibrinogen, fibronectin, or collagen.

[0643] The S. pneumoniae strain 23F Poland 16 AI sortase proteins are predicted to be involved in the secretion and anchoring of the LPXTG containing surface proteins. S. pneumoniae strain 23F Poland 16 AI may encode for at least one surface protein. Alternatively, S. pneumoniae strain 23F Poland 16 AI may encode for at least two surface exposed proteins and at least one sortase. Preferably, S. pneumoniae strain 23F Poland 16 AI encodes for at least three surface exposed proteins and at least two sortases.

[0644] The AI surface proteins may be covalently attached to the bacterial cell wall by membrane-associated transpeptidases, such as an AI sortase. The sortase may function to cleave the surface protein, preferably between the threonine and glycine residues of an LPXTG motif. The sortase may then assist in the formation of an amide link between the threonine carboxyl group and a cell wall precursor such as lipid II. The precursor can then be incorporated into the peptidoglycan via the transglycoslylation and transpeptidation reactions of bacterial wall synthesis. See Comfort et al., Infection & Immunity (2004) 72(5): 2710-2722.

[0645] In one embodiment, the invention includes a composition comprising oligomeric, pilus-like structures comprising a S. pneumoniae strain 23F Poland 16 AI surface protein such as orf3_{—}23FP, orf4_{—}23FP, or orf5_{—}23FP. The oligomeric, pilus-like structure may comprise numerous units of AI surface protein. Preferably, the oligomeric, pilus-like structures comprise two or more AI surface proteins. Still more preferably, the oligomeric, pilus-like structure comprises a hyper-oligomeric pilus-like structure comprising at least two (e.g., 2, 3, 4, 5, 6, 7, 8, 9, 10, 11, 12, 13, 14, 15, 20, 25, 30, 35, 40, 45, 50, 60, 70, 80, 90, 100, 120, 140, 150, 200 or more) oligomeric subunits, wherein each subunit comprises an AI surface protein or a fragment thereof. The oligomeric subunits may be covalently associated via a conserved lysine within a pilin motif. The oligomeric subunits may be covalently associated via an LPXTG motif, preferably, via the threonine or serine amino acid residue, respectively.

[0646] AI surface proteins or fragments thereof to be incorporated into the oligomeric, pilus-like structures of the invention will preferably include a pilin motif.

[0647] The oligomeric, pilus like structures may be used alone or in the combinations of the invention. In one embodiment, the invention comprises a S. pneumoniae strain 23F Poland 16 AI protein in oligomeric form, preferably in a hyperoligomeric form. In one embodiment, the invention comprises a composition comprising one or more S. pneumoniae strain 23F Poland 16 AI proteins and one or more AI proteins from any one or more S. pneumoniae strains of TIGR4, 670, 19A Hungary 6, 6B Finland 12, 6B Spain 2, 9V Spain 3, 19F Taiwan 14, 23F Taiwan 15, or 14 CSR 10, wherein one or more of the S. pneumoniae AI proteins is in the form of an oligomer, preferably in a hyperoligomeric form.

[0648] In addition to the open reading frames encoding the S. pneumoniae strain 23F Poland 16 AI proteins, S. pneumoniae strain 23F Poland 16 AI may also include a transcriptional regulator.

S. pneumoniae Strain 23F Taiwan 15 Adhesin Island

[0649] As discussed above, Applicants have identified adhesin islands within the genome of S. pneumoniae strain 23F Taiwan 15. The S. pneumoniae strain 23F Taiwan 15 Adhesin Island comprises a series of approximately seven open reading frames encoding for a collection of amino acid sequences comprising surface proteins and sortases. Specifically, the S. pneumoniae strain 23F Taiwan 15 AI proteins includes open reading frames encoding for two or more (i.e., 2, 3, 4, 5, 6, or 7) of ORF2_{—}23FTW, ORF3_{—}23FTW, ORF4_{—}23FTW, ORF5_{—}23FTW, ORF6_{—}23FTW, ORF7_{—}23F[W, ORF8_{—}23FTW.

[0650] A preferred immunogenic composition of the invention comprises a S. pneumoniae strain 23F Taiwan 15 AI surface protein which may be formulated or purified in an oligomeric (pilis) form. Another preferred immunogenic composition of the invention comprises a S. pneumoniae strain 23F Taiwan 15 AI surface protein which has been isolated in an oligomeric (pilis) form.

[0651] One or more of the S. pneumoniae strain 23F Taiwan 15 AI open reading frame polynucleotide sequences may be replaced by a polynucleotide sequence coding for a fragment of the replaced ORF. Alternatively, one or more of the S. pneumoniae strain 23F Taiwan 15 AI open reading frames may be replaced by a sequence having sequence homology to the replaced ORF.

[0652] One or more of the S. pneumoniae strain 23F Taiwan 15 AI surface protein sequences typically include an LPXTG motif (such as LPXTG (SEQ ID NO: 122)) or other sortase substrate motif.

[0653] The S. pneumoniae strain 23F Taiwan 15 AI surface proteins of the invention may affect the ability of the S. pneumoniae bacteria to adhere to and invade epithelial cells. AI surface proteins may also affect the ability of S. pneumoniae to translocate through an epithelial cell layer. Preferably, one or more S. pneumoniae strain 23F Taiwan 15 AI surface proteins are capable of binding to or otherwise associating with an epithelial cell surface. S. pneumoniae strain 23F Taiwan 15 AI surface proteins may also be able to bind to or associate with fibrinogen, fibronectin, or collagen.

[0654] The S. pneumoniae strain 23F Taiwan 15 AI sortase proteins are predicted to be involved in the secretion and anchoring of the LPXTG containing surface proteins. S. pneumoniae strain 23F Taiwan 15 AI may encode for at least one surface protein. Alternatively, S. pneumoniae strain 23F Taiwan 15 AI may encode for at least two surface exposed proteins and at least one sortase. Preferably, S. pneumoniae strain 23F Taiwan 15 AI encodes for at least three surface exposed proteins and at least two sortases.

[0655] The AI surface proteins may be covalently attached to the bacterial cell wall by membrane-associated transpeptidases, such as an AI sortase. The sortase may function to cleave the surface protein, preferably between the threonine and glycine residues of an LPXTG motif. The sortase may then assist in the formation of an amide link between the threonine carboxyl group and a cell wall precursor such as lipid II. The precursor can then be incorporated into the peptidoglycan via the transglycoslylation and transpeptidation reactions of bacterial wall synthesis. See Comfort et al., Infection & Immunity (2004) 72(5): 2710-2722.

[0656] In one embodiment, the invention includes a composition comprising oligomeric, pilus-like structures comprising a S. pneumoniae strain 23F Taiwan 15 AI surface protein such as orf3_{—}23FTW, orf4_{—}23FTW, or orf5_{—}23FTW. The oligomeric, pilus-like structure may comprise numerous units of AI surface protein. Preferably, the oligomeric, pilus-like structures comprise two or more AI surface proteins. Still more preferably, the oligomeric, pilus-like structure comprises a hyper-oligomeric pilus-like structure comprising at least two (e.g., 2, 3, 4, 5, 6, 7, 8, 9, 10, 11, 12, 13, 14, 15, 20, 25, 30, 35, 40, 45, 50, 60, 70, 80, 90, 100, 120, 140, 150, 200 or more) oligomeric subunits, wherein each subunit comprises an AI surface protein or a fragment thereof. The oligomeric subunits may be covalently associated via a conserved lysine within a pilin motif. The oligomeric subunits may be covalently associated via an LPXTG motif, preferably, via the threonine or serine amino acid residue, respectively.

[0657] AI surface proteins or fragments thereof to be incorporated into the oligomeric, pilus-like structures of the invention will preferably include a pilin motif.

[0658] The oligomeric, pilus like structures may be used alone or in the combinations of the invention. In one embodiment, the invention comprises a S. pneumoniae strain 23F Taiwan 15 AI protein in oligomeric form, preferably in a hyperoligomeric form. In one embodiment, the invention comprises a composition comprising one or more S. pneumoniae strain 23F Taiwan 15 AI proteins and one or more AI proteins from any one or more of S. pneumoniae from TIGR4, 670, 19A Hungary 6, 6B Finland 12, 6B Spain 2, 9V Spain 3, 19F Taiwan 14, 14 CSR 10, or 23F Poland 16 AI, wherein one or more of the S. pneumoniae AI proteins is in the form of an oligomer, preferably in a hyperoligomeric form.

[0659] In addition to the open reading frames encoding the S. pneumoniae strain 23F Taiwan 15 AI proteins, S. pneumoniae strain 23F Taiwan 15 AI may also include a transcriptional regulator.

S. pneumoniae Strain 6B Finland 12 Adhesin Island

[0660] As discussed above, Applicants have identified adhesin islands within the genome of S. pneumoniae strain 6B Finland 12. The S. pneumoniae strain 6B Finland 12 Adhesin Island comprises a series of approximately seven open reading frames encoding for a collection of amino acid sequences comprising surface proteins and sortases. Specifically, the S. pneumoniae strain 6B Finland 12 AI proteins includes open reading frames encoding for two or more (i.e., 2, 3, 4, 5, 6, or 7) of ORF2_{—}6BF, ORF3_{—}6BF, ORF4_{—}6BF, ORF5_{—}6BF, ORF6_{—}6BF, ORF7_{—}6BF, ORF8_{—}6BF.

[0661] A preferred immunogenic composition of the invention comprises a S. pneumoniae strain 6B Finland 12 AI surface protein which may be formulated or purified in an oligomeric (pilis) form. Another preferred immunogenic composition of the invention comprises a S. pneumoniae strain 6B Finland 12 AI surface protein which has been isolated in an oligomeric (pilis) form.

[0662] One or more of the S. pneumoniae strain 6B Finland 12 AI open reading frame polynucleotide sequences may be replaced by a polynucleotide sequence coding for a fragment of the replaced ORF. Alternatively, one or more of the S. pneumoniae strain 6B Finland 12 AI open reading frames may be replaced by a sequence having sequence homology to the replaced ORF.

[0663] One or more of the S. pneumoniae strain 6B Finland 12 AI surface protein sequences typically include an LPXTG motif (such as LPXTG (SEQ ID NO: 122)) or other sortase substrate motif.

[0664] The S. pneumoniae strain 6B Finland 12 AI surface proteins of the invention may affect the ability of the S. pneumoniae bacteria to adhere to and invade epithelial cells. AI surface proteins may also affect the ability of S. pneumoniae to translocate through an epithelial cell layer. Preferably, one or more S. pneumoniae strain 6B Finland 12 AI surface proteins are capable of binding to or otherwise associating with an epithelial cell surface. S. pneumoniae strain 6B Finland 12 AI surface proteins may also be able to bind to or associate with fibrinogen, fibronectin, or collagen.

[0665] The S. pneumoniae strain 6B Finland 12 AI sortase proteins are predicted to be involved in the secretion and anchoring of the LPXTG containing surface proteins. S. pneumoniae strain 6B Finland 12 AI may encode for at least one surface protein. Alternatively, S. pneumoniae strain 6B Finland 12 AI may encode for at least two surface exposed proteins and at least one sortase. Preferably, S. pneumoniae strain 6B Finland 12 AI encodes for at least three surface exposed proteins and at least two sortases.

[0666] The AI surface proteins may be covalently attached to the bacterial cell wall by membrane-associated transpeptidases, such as an AI sortase. The sortase may function to cleave the surface protein, preferably between the threonine and glycine residues of an LPXTG motif. The sortase may then assist in the formation of an amide link between the threonine carboxyl group and a cell wall precursor such as lipid II. The precursor can then be incorporated into the peptidoglycan via the transglycoslylation and transpeptidation reactions of bacterial wall synthesis. See Comfort et al., Infection & Immunity (2004) 72(5): 2710-2722.

[0667] In one embodiment, the invention includes a composition comprising oligomeric, pilus-like structures comprising a S. pneumoniae strain 6B Finland 12 AI surface protein such as orf3_{—}6BF, orf4_{—}6BF, or orf5_{—}6BF. The oligomeric, pilus-like structure may comprise numerous units of AI surface protein. Preferably, the oligomeric, pilus-like structures comprise two or more AI surface proteins. Still more preferably, the oligomeric, pilus-like structure comprises a hyper-oligomeric pilus-like structure comprising at least two (e.g., 2, 3, 4, 5, 6, 7, 8, 9, 10, 11, 12, 13, 14, 15, 20, 25, 30, 35, 40, 45, 50, 60, 70, 80, 90, 100, 120, 140, 150, 200 or more) oligomeric subunits, wherein each subunit comprises an AI surface protein or a fragment thereof. The oligomeric subunits may be covalently associated via a conserved lysine within a pilin motif. The oligomeric subunits may be covalently associated via an LPXTG motif, preferably, via the threonine or serine amino acid residue, respectively.

[0668] AI surface proteins or fragments thereof to be incorporated into the oligomeric, pilus-like structures of the invention will preferably include a pilin motif.

[0669] The oligomeric, pilus like structures may be used alone or in the combinations of the invention. In one embodiment, the invention comprises a S. pneumoniae strain 6B Finland 12 AI protein in oligomeric form, preferably in a hyperoligomeric form. In one embodiment, the invention comprises a composition comprising one or more S. pneumoniae strain 6B Finland 12 AI proteins and one or more AI proteins of any one or more of S. pneumoniae from TIGR4, 670, 19A Hungary 6, 6B Finland 12, 6B Spain 2, 9V Spain 3, 19F Taiwan 14, 23F Taiwan 15, or 23F Poland 16 AI, wherein one or more of the S. pneumoniae AI proteins is in the form of an oligomer, preferably in a hyperoligomeric form.

[0670] In addition to the open reading frames encoding the S. pneumoniae strain 6B Finland 12 AI proteins, S. pneumoniae strain 6B Finland 12 AI may also include a transcriptional regulator.

S. pneumoniae Strain 6B Spain 2 Adhesin Island

[0671] As discussed above, Applicants have identified adhesin islands within the genome of S. pneumoniae strain 6B Spain 2. The S. pneumoniae strain 6B Spain 2 Adhesin Island comprises a series of approximately seven open reading frames encoding for a collection of amino acid sequences comprising surface proteins and sortases. Specifically, the S. pneumoniae strain 6B Spain 2 AI proteins includes open reading frames encoding for two or more (i.e., 2, 3, 4, 5, 6, or 7) of ORF2_{—}6BSP, ORF3_{—}6BSP, ORF4_{—}6BSP, ORF5_{—}6BSP, ORF6_{—}6BSP, ORF7_{—}6BSP, and ORF8_{—}6BSP.

[0672] A preferred immunogenic composition of the invention comprises a S. pneumoniae strain 6B Spain 2 AI surface protein which may be formulated or purified in an oligomeric (pilis) form. Another preferred immunogenic composition of the invention comprises a S. pneumoniae strain 6B Spain 2 AI surface protein which has been isolated in an oligomeric (pilis) form.

[0673] One or more of the S. pneumoniae strain 6B Spain 2 AI open reading frame polynucleotide sequences may be replaced by a polynucleotide sequence coding for a fragment of the replaced ORF. Alternatively, one or more of the S. pneumoniae strain 6B Spain 2 AI open reading frames may be replaced by a sequence having sequence homology to the replaced ORF.

[0674] One or more of the S. pneumoniae strain 6B Spain 2 AI surface protein sequences typically include an LPXTG motif (such as LPXTG (SEQ ID NO: 122)) or other sortase substrate motif.

[0675] The S. pneumoniae strain 6B Spain 2 AI surface proteins of the invention may affect the ability of the S. pneumoniae bacteria to adhere to and invade epithelial cells. AI surface proteins may also affect the ability of S. pneumoniae to translocate through an epithelial cell layer. Preferably, one or more S. pneumoniae strain 6B Spain 2 AI surface proteins are capable of binding to or otherwise associating with an epithelial cell surface. S. pneumoniae strain 6B Spain 2 AI surface proteins may also be able to bind to or associate with fibrinogen, fibronectin, or collagen.

[0676] The S. pneumoniae strain 6B Spain 2 AI sortase proteins are predicted to be involved in the secretion and anchoring of the LPXTG containing surface proteins. S. pneumoniae strain 6B Spain 2 AI may encode for at least one surface protein. Alternatively, S. pneumoniae strain 6B Spain 2 AI may encode for at least two surface exposed proteins and at least one sortase. Preferably, S. pneumoniae strain 6B Spain 2 AI encodes for at least three surface exposed proteins and at least two sortases.

[0677] The AI surface proteins may be covalently attached to the bacterial cell wall by membrane-associated transpeptidases, such as an AI sortase. The sortase may function to cleave the surface protein, preferably between the threonine and glycine residues of an LPXTG motif. The sortase may then assist in the formation of an amide link between the threonine carboxyl group and a cell wall precursor such as lipid II. The precursor can then be incorporated into the peptidoglycan via the transglycoslylation and transpeptidation reactions of bacterial wall synthesis. See Comfort et al., Infection & Immunity (2004) 72(5): 2710-2722.

[0678] In one embodiment, the invention includes a composition comprising oligomeric, pilus-like structures comprising a S. pneumoniae strain 6B Spain 2 AI surface protein such as orf3_{—}6BSP, orf4_{—}6BSP, or orf5_{—}6BSP. The oligomeric, pilus-like structure may comprise numerous units of AI surface protein. Preferably, the oligomeric, pilus-like structures comprise two or more AI surface proteins. Still more preferably, the oligomeric, pilus-like structure comprises a hyper-oligomeric pilus-like structure comprising at least two (e.g., 2, 3, 4, 5, 6, 7, 8, 9, 10, 11, 12, 13, 14, 15, 20, 25, 30, 35, 40, 45, 50, 60, 70, 80, 90, 100, 120, 140, 150, 200 or more) oligomeric subunits, wherein each subunit comprises an AI surface protein or a fragment thereof. The oligomeric subunits may be covalently associated via a conserved lysine within a pilin motif. The oligomeric subunits may be covalently associated via an LPXTG motif, preferably, via the threonine or serine amino acid residue, respectively.

[0679] AI surface proteins or fragments thereof to be incorporated into the oligomeric, pilus-like structures of the invention will preferably include a pilin motif.

[0680] The oligomeric, pilus like structures may be used alone or in the combinations of the invention. In one embodiment, the invention comprises a S. pneumoniae strain 6B Spain 2 AI protein in oligomeric form, preferably in a hyperoligomeric form. In one embodiment, the invention comprises a composition comprising one or more S. pneumoniae strain 6B Spain 2 AI proteins and one or more AI proteins of any one or more of S. pneumoniae from TIGR4, 670, 19A Hungary 6, 6B Finland 12, 14 CSR 10, 9V Spain 3, 19F Taiwan 14, 23F Taiwan 15, or 23F Poland 16 AI, wherein one or more of the S. pneumoniae AI proteins is in the form of an oligomer, preferably in a hyperoligomeric form.

[0681] In addition to the open reading frames encoding the S. pneumoniae strain 6B Spain 2 AI proteins, S. pneumoniae strain 6B Spain 2 AI may also include a transcriptional regulator.

S. pneumoniae Strain 9V Spain 3 Adhesin Island

[0682] As discussed above, Applicants have identified adhesin islands within the genome of S. pneumoniae strain 9V Spain 3. The S. pneumoniae strain 9V Spain 3 Adhesin Island comprises a series of approximately seven open reading frames encoding for a collection of amino acid sequences comprising surface proteins and sortases. Specifically, the S. pneumoniae strain 9V Spain 3 AI proteins includes open reading frames encoding for two or more (i.e., 2, 3, 4, 5, 6, or 7) of ORF2_{—}9VSP, ORF3_{—}9VSP, ORF4_{—}9VSP, ORF5_{—}9VSP, ORF6_{—}9VSP, ORF7_{—}9VSP, and ORF8_{—}9VSP.

[0683] A preferred immunogenic composition of the invention comprises a S. pneumoniae strain 9V Spain 3 AI surface protein which may be formulated or purified in an oligomeric (pilis) form. Another preferred immunogenic composition of the invention comprises a S. pneumoniae strain 9V Spain 3 AI surface protein which has been isolated in an oligomeric (pilis) form.

[0684] One or more of the S. pneumoniae strain 9V Spain 3 AI open reading frame polynucleotide sequences may be replaced by a polynucleotide sequence coding for a fragment of the replaced ORF. Alternatively, one or more of the S. pneumoniae strain 9V Spain 3 AI open reading frames may be replaced by a sequence having sequence homology to the replaced ORF.

[0685] One or more of the S. pneumoniae strain 9V Spain 3 AI surface protein sequences typically include an LPXTG motif (such as LPXTG (SEQ ID NO: 122)) or other sortase substrate motif.

[0686] The S. pneumoniae strain 9V Spain 3 AI surface proteins of the invention may affect the ability of the S. pneumoniae bacteria to adhere to and invade epithelial cells. AI surface proteins may also affect the ability of S. pneumoniae to translocate through an epithelial cell layer. Preferably, one or more S. pneumoniae strain 9V Spain 3 AI surface proteins are capable of binding to or otherwise associating with an epithelial cell surface. S. pneumoniae strain 9V Spain 3 AI surface proteins may also be able to bind to or associate with fibrinogen, fibronectin, or collagen.

[0687] The S. pneumoniae strain 9V Spain 3 AI sortase proteins are predicted to be involved in the secretion and anchoring of the LPXTG containing surface proteins. S. pneumoniae strain 9V Spain 3 AI may encode for at least one surface protein. Alternatively, S. pneumoniae strain 9V Spain 3 AI may encode for at least two surface exposed proteins and at least one sortase. Preferably, S. pneumoniae strain 9V Spain 3 AI encodes for at least three surface exposed proteins and at least two sortases.

[0688] The AI surface proteins may be covalently attached to the bacterial cell wall by membrane-associated transpeptidases, such as an AI sortase. The sortase may function to cleave the surface protein, preferably between the threonine and glycine residues of an LPXTG motif. The sortase may then assist in the formation of an amide link between the threonine carboxyl group and a cell wall precursor such as lipid II. The precursor can then be incorporated into the peptidoglycan via the transglycoslylation and transpeptidation reactions of bacterial wall synthesis. See Comfort et al., Infection & Immunity (2004) 72(5): 2710-2722.

[0689] In one embodiment, the invention includes a composition comprising oligomeric, pilus-like structures comprising a S. pneumoniae strain 9V Spain 3 AI surface protein such as orf3_{—}9VSP, orf4_{—}9VSP, or orf5_{—}9VSP. The oligomeric, pilus-like structure may comprise numerous units of AI surface protein. Preferably, the oligomeric, pilus-like structures comprise two or more AI surface proteins. Still more preferably, the oligomeric, pilus-like structure comprises a hyper-oligomeric pilus-like structure comprising at least two (e.g., 2, 3, 4, 5, 6, 7, 8, 9, 10, 11, 12, 13, 14, 15, 20, 25, 30, 35, 40, 45, 50, 60, 70, 80, 90, 100, 120, 140, 150, 200 or more) oligomeric subunits, wherein each subunit comprises an AI surface protein or a fragment thereof. The oligomeric subunits may be covalently associated via a conserved lysine within a pilin motif. The oligomeric subunits may be covalently associated via an LPXTG motif, preferably, via the threonine or serine amino acid residue, respectively.

[0690] AI surface proteins or fragments thereof to be incorporated into the oligomeric, pilus-like structures of the invention will preferably include a pilin motif.

[0691] The oligomeric, pilus like structures may be used alone or in the combinations of the invention. In one embodiment, the invention comprises a S. pneumoniae strain 9V Spain 3 AI protein in oligomeric form, preferably in a hyperoligomeric form. In one embodiment, the invention comprises a composition comprising one or more S. pneumoniae strain 9V Spain 3 AI proteins and one or more AI proteins from any one or more of S. pneumoniae from TIGR4, 670, 19A Hungary 6, 6B Finland 12, 6B Spain 2, 14 CSR 10, 19F Taiwan 14, 23F Taiwan 15, or 23F Poland 16 AI, wherein one or more of the S. pneumoniae AI proteins is in the form of an oligomer, preferably in a hyperoligomeric form.

[0692] In addition to the open reading frames encoding the S. pneumoniae strain 9V Spain 3 AI proteins, S. pneumoniae strain 9V Spain 3 AI may also include a transcriptional regulator.

[0693] The S. pneumoniae oligomeric, pilus-like structures may be isolated or purified from bacterial cultures in which the bacteria express an S. pneumoniae AI surface protein. The invention therefore includes a method for manufacturing an oligomeric AI surface antigen comprising culturing a S. pneumoniae bacterium that expresses the oligomeric AI protein and isolating the expressed oligomeric AI protein from the S. pneumoniae bacteria. The AI protein may be collected from secretions into the supernatant or it may be purified from the bacterial surface. The method may further comprise purification of the expressed AI protein. Preferably, the AI protein is in a hyperoligomeric form.

[0694] The oligomeric, pilus-like structures may be isolated or purified from bacterial cultures overexpressing an AI surface protein. The invention therefore includes a method for manufacturing an S. pneumoniae oligomeric Adhesin Island surface antigen comprising culturing a S. pneumoniae bacterium adapted for increased AI protein expression and isolation of the expressed oligomeric Adhesin Island protein from the S. pneumoniae bacteria. The AI protein may be collected from secretions into the supernatant or it may be purified from the bacterial surface. The method may further comprise purification of the expressed Adhesin Island protein. Preferably, the Adhesin Island protein is in a hyperoligomeric form.

[0695] The S. pneumoniae bacteria are preferably adapted to increase AI protein expression by at least two (e.g., 2, 3, 4, 5, 8, 10, 15, 20, 25, 30, 35, 40, 45, 50, 60, 70, 80, 90, 100, 125, 150 or 200) times wild type expression levels.

[0696] S. pneumoniae bacteria may be adapted to increase AI protein expression by any means known in the art, including methods of increasing gene dosage and methods of gene upregulation. Such means include, for example, transformation of the S. pneumoniae bacteria with a plasmid encoding the AI protein. The plasmid may include a strong promoter or it may include multiple copies of the sequence encoding the AI protein. Optionally, the sequence encoding the AI protein within the S. pneumoniae bacterial genome may be deleted. Alternatively, or in addition, the promoter regulating the S. pneumoniae Adhesin Island may be modified to increase expression.

[0697] The invention further includes S. pneumoniae bacteria which have been adapted to produce increased levels of AI surface protein. In particular, the invention includes S. pneumoniae bacteria which have been adapted to produce oligomeric or hyperoligomeric AI surface protein. In one embodiment, the S. pneumoniae of the invention are inactivated or attenuated to permit in vivo delivery of the whole bacteria, with the AI surface protein exposed on its surface.

[0698] The invention further includes S. pneumoniae bacteria which have been adapted to have increased levels of expressed AI protein incorporated in pili on their surface. The S. pneumoniae bacteria may be adapted to have increased exposure of oligomeric or hyperoligomeric AI proteins on its surface by increasing expression levels of a signal peptidase polypeptide. Increased levels of a local signal peptidase expression in Gram positive bacteria (such us LepA in GAS) are expected to result in increased exposure of pili proteins on the surface of Gram positive bacteria. Increased expression of a leader peptidase in S. pneumoniae may be achieved by any means known in the art, such as increasing gene dosage and methods of gene upregulation. The S. pneumoniae bacteria adapted to have increased levels of leader peptidase may additionally be adapted to express increased levels of at least one pili protein.

[0699] Alternatively, the AI proteins of the invention may be expressed on the surface of a non-pathogenic Gram positive bacteria, such as Streptococus gordonii (See, e.g., Byrd et al., “Biological consequences of antigen and cytokine co-expression by recombinant Streptococcus gordonii vaccine vectors”, Vaccine (2002) 20:2197-2205) or Lactococcus lactis (See, e.g., Mannam et al., “Mucosal Vaccine Made from Live, Recombinant Lactococcus lactis Protects Mice against Pharangeal Infection with Streptococcus pyogenes” Infection and Immunity (2004) 72(6):3444-3450). As used herein, non-pathogenic Gram positive bacteria refer to Gram positive bacteria which are compatible with a human host subject and are not associated with human pathogenisis. Preferably, the non-pathogenic bacteria are modified to express the AI surface protein in oligomeric, or hyper-oligomeric form. Sequences encoding for an AI surface protein and, optionally, an AI sortase, may be integrated into the non-pathogenic Gram positive bacterial genome or inserted into a plasmid. The non-pathogenic Gram positive bacteria may be inactivated or attenuated to facilitate in vivo delivery of the whole bacteria, with the AI surface protein exposed on its surface. Alternatively, the AI surface protein may be isolated or purified from a bacterial culture of the non-pathogenic Gram positive bacteria. For example, the AI surface protein may be isolated from cell extracts or culture supernatants. Alternatively, the AI surface protein may be isolated or purified from the surface of the non-pathogenic Gram positive bacteria.

[0700] The non-pathogenic Gram positive bacteria may be used to express any of the S. pneumoniae Adhesin Island proteins described herein. The non-pathogenic Gram positive bacteria are transformed to express an Adhesin Island surface protein. Preferably, the non-pathogenic Gram positive bacteria also express at least one Adhesin Island sortase. The AI transformed non-pathogenic Gram positive bacteria of the invention may be used to prevent or treat infection with pathogenic S. pneumoniae.

[0701] FIGS. 190 A and B, and 193-195 provide examples of three methods successfully practiced by applicants to purify pili from S. pneumoniae TIGR4.

Immunogenic Compositions

[0702] The Gram positive bacteria AI proteins described herein are useful in immunogenic compositions for the prevention or treatment of Gram positive bacterial infection. For example, the GBS AI surface proteins described herein are useful in immunogenic compositions for the prevention or treatment of GBS infection. As another example, the GAS AI surface proteins described herein may be useful in immunogenic compositions for the prevention or treatment of GAS infection. As another example, the S. pneumoniae AI surface proteins may be useful in immunogenic cojmpositions for the prevention or treatment of S. pneumoniae infection.

[0703] Gram positive bacteria AI surface proteins that can provide protection across more than one serotype or strain isolate may be used to increase immunogenic effectiveness. For example, a particular GBS AI surface protein having an amino acid sequence that is at least 50% (i.e., at least 55%, 60%, 65%, 70%, 75%, 80%, 85%, 90%, 95%, 96%, 97%, 98%, 99%, or 100%) homologous to the particular GBS AI surface protein of at least 2 (i.e., at least 3, 4, 5, 6, 7, 8, 9, 10, or more) other GBS serotypes or strain isolates may be used to increase the effectiveness of such compositions.

[0704] As another example, fragments of Gram positive bacteria AI surface proteins that can provide protection across more than one serotype or strain isolate may be used to increase immunogenic effectiveness. Such a fragment may be identified within a consensus sequence of a full length amino acid sequence of a Gram positive bacteria AI surface protein. Such a fragment can be identified in the consensus sequence by its high degree of homology or identity across multiple (i.e, at least 3, 4, 5, 6, 7, 8, 9, 10, or more) Gram positive bacteria serotypes or strain isolates. Preferably, a high degree of homology is a degree of homology of at least 90% (i.e., at least 90%, 91%, 92%, 93%, 94%, 95%, 96%, 97%, 98%, 99%, or 100%) across Gram positive bacteria serotypes or strain isolates. Preferably, a high degree of identity is a degree of identity of at least 90% (i.e., at least 90%, 91%, 92%, 93%, 94%, 95%, 96%, 97%, 98%, 99%, or 100%) across Gram positive bacteria serotypes or strain isolates. In one embodiment of the invention, such a fragment of a Gram positive bacteria AI surface protein may be used in the immunogenic compositions.

[0705] In addition, the AI surface protein oligomeric pilus structures may be formulated or purified for use in immunization. Isolated AI surface protein oligomeric pilus structures may also be used for immunization.

[0706] The invention includes an immunogenic composition comprising a first Gram positive bacteria AI protein and a second Gram positive bacterial AI protein. One or more of the AI proteins may be a surface protein. Such surface proteins may contain an LPXTG motif or other sortase substrate motif.

[0707] The first and second AI proteins may be from the same or different genus or species of Gram positive bacteria. If within the same species, the first and second AI proteins may be from the same or different AI subtypes. If two AIs are of the same subtype, the AIs have the same numerical designation. For example, all AIs designated as AI-1 are of the same AI subtype. If two AIs are of a different subtype, the AIs have different numerical designations. For example, AI-1 is of a different AI subtype from AI-2, AI-3, AI-4, etc. Likewise, AI-2 is of a different AI subtype from AI-1, AI-3, and AI-4, etc.

[0708] For example, the invention includes an immunogenic composition comprising one or more GBS AI-1 proteins and one or more GBS AI-2 proteins. One or more of the AI proteins may be a surface protein. Such surface proteins may contain an LPXTG motif (such as LPXTG (SEQ ID NO: 122)) and may bind fibrinogen, fibronectin, or collagen. One or more of the AI proteins may be a sortase. The GBS AI-1 proteins may be selected from the group consisting of GBS 80, GBS 104, GBS 52, SAG0647 and SAG0648. Preferably, the GBS AI-1 proteins include GBS 80 or GBS 104.

[0709] The GBS AI-2 proteins may be selected from the group consisting of GBS 67, GBS 59, GBS 150, SAG1405, SAG1406, 01520, 01521, 01522, 01523, 01523, 01524 and 01525. In one embodiment, the GBS AI-2 proteins are selected from the group consisting of GBS 67, GBS 59, GBS 150, SAG1405, and SAG1406. In another embodiment, the GBS AI-2 proteins may be selected from the group consisting of 01520, 01521, 01522, 01523, 01523, 01524 and 01525. Preferably, the GBS AI-2 protein includes GBS 59 or GBS 67.

[0710] As another example, the invention includes an immunogenic composition comprising one or more of any combination of GAS AI-1, GAS AI-2, GAS AI-3, or GAS AI-4 proteins. One or more of the GAS AI proteins may be a sortase. The GAS AI-1 proteins may be selected from the group consisting of M6_Spy0156, M6_Spy0157, M6_Spy0158, M6_Spy0159, M6_Spy0160, M6_Spy0161, CDC SS 410_fimbrial, ISS3650_fimbrial, and DSM2071_fimbrial. Preferably, the GAS AI-1 proteins are selected from the group consisting of M6_Spy0157, M6_Spy0159, M6_Spy0160, CDC SS 410_fimbrial, ISS3650_fimbrial, and DSM2071_fimbrial.

[0711] The GAS AI-2 proteins may be selected from the group consisting of Spy0124, GAS15, Spy0127, GAS16, GAS17, GAS18, Spy0131, Spy0133, and GAS20. Preferably, the GAS AI-2 proteins are selected from the group consisting of GAS 15, GAS 16, and GAS 18.

[0712] The GAS AI-3 proteins may be selected from the group consisting of SpyM3_{—}0097, SpyM3_{—}0098, SpyM3_{—}0099, SpyM3_{—}0100, SpyM3_{—}0101, SpyM3_{—}0102, SpyM3_{—}0103, SpyM3_{—}0104, SPs0099, SPs0100, SPs0101, SPs0102, SPs0103, SPs0104, SPs0105, SPs0106, orf77, orf78, orf79, orf80, orf81, orf82, orf83, orf84, spyM18_{—}0125, spyM18_{—}0126, spyM18_{—}0127, spyM18_{—}0128, spyM18_{—}0129, spyM18_{—}0130, spyM18_{—}0131, spyM18_{—}0132, SpyoM01000156, SpyoM01000155, SpyoM01000154, SpyoM01000153, SpyoM01000152, SpyoM01000151, SpyoM01000150, SpyoM01000149, ISS3040_fimbrial, ISS3776_fimbrial, and ISS4959_fimbrial. In one embodiment the GAS AI-3 proteins are selected from the group consisting of SpyM3_{—}0097, SpyM3_{—}0098, SpyM3_{—}0099, SpyM3_{—}0100, SpyM3_{—}0101, SpyM3_{—}0102, SpyM3_{—}0103, and SpyM3_{—}0104. In another embodiment, the GAS AI-3 proteins are selected from the group consisting of SPs0099, SPs0100, SPs0101, SPs0102, SPs0103, SPs0104, SPs0105, and SPs0106. In yet another embodiment, the GAS AI-3 proteins are selected from the group consisting of orf77, orf78, orf79, orf80, orf81, orf82, orf83, and orf84. In a further embodiment, the GAS AI-3 proteins are selected from the group consisting of spyM18_{—}0125, spyM18_{—}0126, spyM18_{—}0127, spyM18_{—}0128, spyM18_{—}0129, spyM18_{—}0130, spyM18_{—}0131, and spyM18_{—}0132. In yet another embodiment the GAS AI-3 proteins are selected from the group consisting of SpyoM01000156, SpyoM01000155, SpyoM01000154, SpyoM01000153, SpyoM01000152, SpyoM01000151, SpyoM01000150, and SpyoM01000149.

[0713] The GAS AI-4 proteins may be selected from the group consisting of 19224133, 19224134, 19224135, 19224136, 19224137, 19224138, 19224139, 19224140, 19224141, 20010296_fimbrial, 20020069_fimbrial, CDC SS 635_fimbrial, ISS4883_fimbrial, and ISS4538_fimbrial. Preferably, the GAS-AI-4 proteins are selected from the group consisting of 19224134, 19224135, 19224137, 19224139, 19224141, 20010296_fimbrial, 20020069_fimbrial, CDC SS 635_fimbrial, ISS4883_fimbrial, and ISS4538_fimbrial.

[0714] As yet another example, the invention includes an immunogenic composition comprising one or more of any combination of S. pneumonaie from TIGR4, S. pneumonaie strain 670, S. pneumonaie from 19A Hungary 6, S. pneumonaie from 6B Finland 12, S. pneumonaie from 6B Spain 2, S. pneumonaie from 9V Spain 3, S. pneumonaie from 14 CSR 10, S. pneumonaie from 19F Taiwan 14, S. pneumonaie from 23F Taiwan 15, or S. pneumonaie from 23F Poland 16 AI proteins. One or more of the AI proteins may be a surface protein. Such surface proteins may contain an LPXTG motif (such as LPXTG (SEQ ID NO: 122)) and may bind fibrinogen, fibronectin, or collagen. One or more of the AI proteins may be a sortase.

[0715] The S. pneumonaie from TIGR4 AI proteins may be selected from the group consisting of SP0462, SP0463, SP0464, SP0465, SP0466, SP0467, SP0468. Preferably, the S. pneumonaie from TIGR4 AI proteins include SP0462, SP0463, or SP0464.

[0716] The S. pneumonaie strain 670 AI proteins may be selected from the group consisting of Orf1_{—}670, Orf3_{—}670, Orf4_{—}670, Orf5_{—}670, Orf6_{—}670, Orf7_{—}670, and Orf8_{—}670. Preferably, the S. pneumonaie strain 670 AI proteins include Orf3_{—}670, Orf4_{—}670, or Orf5_{—}670.

[0717] The S. pneumonaie from 19A Hungary 6 AI proteins may be selected from the group consisting of ORF2_{—}1 gAH, ORF3_{—}1 gAH, ORF4_{—}19AH, ORF5_{—}19AH, ORF6_{—}1 gAH, ORF7_{—}19AH, or ORF8_{—}19AH.

[0718] The S. pneumonaie from 6B Finland 12 AI proteins may be selected from the group consisting of ORF2_{—}6BF, ORF3_{—}6BF, ORF4_{—}6BF, ORF5_{—}6BF, ORF6_{—}6BF, ORF7_{—}6BF, or ORF8_{—}6BF.

[0719] The S. pneumonaie from 6B Spain 2 AI proteins may be selected from the group consisting of ORF2_{—}6BSP, ORF3_{—}6BSP, ORF4_{—}6BSP, ORF5_{—}6BSP, ORF6_{—}6BSP, ORF7_{—}6BSP, or ORF8_{—}6BSP.

[0720] The S. pneumonaie from 9V Spain 3 AI proteins may be selected from the group consisting of ORF2_{—}9VSP, ORF3_{—}9VSP, ORF4_{—}9VSP, ORF5_{—}9VSP, ORF6_{—}9VSP, ORF7_{—}9VSP, or ORF8_{—}9VSP.

[0721] The S. pneumonaie from 14 CSR 10 AI proteins may be selected from the group consisting of ORF2_{—}14CSR, ORF3_{—}14CSR, ORF4_{—}14CSR, ORF5_{—}14CSR, ORF6_{—}14CSR, ORF7_{—}14CSR, or ORF8_{—}14CSR.

[0722] The S. pneumonaie from 19F Taiwan 14 AI proteins may be selected from the group consisting of ORF2_{—}1 gFTW, ORF3_{—}19FTW, ORF4_{—}19FTW, ORF5_{—}19FTW, ORF6_{—}19FTW, ORF7_{—}19FTW, or ORF8_{—}19FTW.

[0723] The S. pneumonaie from 23F Taiwan 15 AI proteins may be selected from the group consisting of ORF2_{—}23FTW, ORF3_{—}23FTW, ORF4_{—}23FTW, ORF5_{—}23FTW, ORF6_{—}23FTW, ORF7_{—}23FTW, or ORF8_{—}23FTW.

[0724] The S. pneumonaie from 23F Poland 16 AI proteins may be selected from the group consisting of ORF2_{—}23FP, ORF3_{—}23FP, ORF4_{—}23FP, ORF5_{—}23FP, ORF6_{—}23FP, ORF7_{—}23FP or ORF8_{—}23FP.

[0725] Preferably, the Gram positive bacteria AI proteins included in the immunogenic compositions of the invention can provide protection across more than one serotype or strain isolate. For example, the immunogenic composition may comprise a first AI protein, wherein the amino acid sequence of said AI protein is at least 90% (i.e., at least 90, 91, 92, 93, 94, 95, 96, 97, 98, 99 or 100%) homologous to the amino acid sequence of a second AI protein, and wherein said first AI protein and said second AI protein are derived from the genomes of different serotypes of a Gram positive bacteria. The first AI protein may also be homologous to the amino acid sequence of a third AI protein, such that the first AI protein, the second AI protein and the third AI protein are derived from the genomes of different serotypes of a Gram positive bacteria. The first AI protein may also be homologous to the amino acid sequence of a fourth AI protein, such that the first AI protein, the second AI protein and the third AI protein are derived from the genomes of different serotypes of a Gram positive bacteria.

[0726] For example, preferably, the GBS AI proteins included in the immunogenic compositions of the invention can provide protection across more than one GBS serotype or strain isolate. For example, the immunogenic composition may comprise a first GBS AI protein, wherein the amino acid sequence of said AI protein is at least 90% (i.e., at least 90, 91, 92, 93, 94, 95, 96, 97, 98, 99 or 100%) homologous to the amino acid sequence of a second GBS AI protein, and wherein said first AI protein and said second AI protein are derived from the genomes of different GBS serotypes. The first GBS AI protein may also be homologous to the amino acid sequence of a third GBS AI protein, such that the first AI protein, the second AI protein and the third AI protein are derived from the genomes of different GBS serotypes. The first AI protein may also be homologous to the amino acid sequence of a fourth GBS AI protein, such that the first AI protein, the second AI protein and the third AI protein are derived from the genomes of different GBS serotypes.

[0727] The first AI protein may be selected from an AI-1 protein or an AI-2 protein. For example, the first AI protein may be a GBS AI-1 surface protein such as GBS 80. The amino acid sequence of GBS 80 from GBS serotype V, strain isolate 2603 is greater than 90% homologous to the GBS 80 amino acid sequence from GBS serotype III, strain isolates NEM316 and COH1 and the GBS 80 amino acid sequence from GBS serotype 1a, strain isolate A909.

[0728] As another example, the first AI protein may be GBS 104. The amino acid sequence of GBS 104 from GBS serotype V, strain isolate 2603 is greater than 90% homologous to the GBS 104 amino acid sequence from GBS serotype III, strain isolates NEM316 and COH1, the GBS 104 amino acid sequence from GBS serotype 1a, strain isolate A909, and the GBS 104 amino acid sequence serotype II, strain isolate 18RS21.

[0729] Table 12 provides the amino acid sequence identity of GBS 80 and GBS 104 across GBS serotypes Ia, Ib, II, III, V, and VIII. The GBS strains in which genes encoding GBS 80 and GBS 104 were identified share, on average, 99.88 and 99.96 amino acid sequence identity, respectively. This high degree of amino acid identity indicates that an immunogenic composition comprising a first protein of GBS 80 or GBS 104 may provide protection across more than one GBS serotype or strain isolate.

TABLE 12
Conservation of GBS 80 and GBS 104 amino acid sequences

| | | GBS 80 | | GBS 104 | |
|---|---|---|---|---|---|
| Serotype | Strains | cGH | % AA identity | cGH | % AA identity |
| Ia | 090 | + | 99.79 | + | 100.00 |
| | A909 | + | 100.00 | + | 100.00 |
| | 515 | − | | − | |
| | DK1 | − | | − | |
| | DK8 | − | | − | |
| | Davis | − | | − | |
| Ib | 7357b | + | 100.00 | + | |
| | H36B | − | | − | |
| II | 18RS21 | − | | + | 100.00 |
| | DK21 | − | | − | |
| III | NEM316 | + | 100.00 | + | 100.00 |
| | COH31 | + | 100.00 | + | |
| | D136 | + | 100.00 | + | |
| | M732 | + | 100.00 | + | 99.88 |
| | COH1 | + | 99.79 | + | 99.88 |
| | M781 | + | 99.79 | + | 99.88 |
| No type | CJB110 | + | 99.37 | + | 100.00 |
| | 1169NT | − | | − | |
| V | CJB111 | + | 100.00 | + | 100.00 |
| | 2603 | + | 100.00 | + | 100.00 |
| VIII | JM130013 | + | 99.79 | + | 100.00 |
| | SMU014 | + | 100.00 | + | |

| | | | | |
|---|---|---|---|---|
| total | 14/22 | 99.88 +/− 0.19 | 15/22 | 99.96 +/− 0.056 |

[0730] As another example, the first AI protein may be an AI-2 protein such as GBS 67. The amino acid sequence of GBS 67 from GBS serotype V, strain isolate 2603 is greater than 90% homologous to the GBS 67 amino acid sequence from GBS serotype III, strain isolate NEM316, the GBS 67 amino acid sequence from GBS serotype 1b, strain isolate H36B, and the GBS 67 amino acid sequence from GBS serotype II, strain isolate 17RS21.

[0731] As another example, the first AI protein may be an AI-2 protein such as spb1. The amino acid sequence of spb1 from GBS serotype III, strain isolate COH1 is greater than 90% homologous to the spb1 amino acid sequence from GBS serotype Ia, strain isolate A909.

[0732] As yet another example, the first AI protein may be an AI-2 protein such as GBS 59. The amino acid sequence of GBS 59 from GBS serotype II, strain isolate 18RS21 is 100% homologous to the GBS 59 amino acid sequence from GBS serotype V, strain isolate 2603. The amino acid sequence of GBS 59 from GBS serotype V, strain isolate CJB111 is 98% homologous to the GBS 59 amino acid sequence from GBS serotype III, strain isolate NEM316.

[0733] The compositions of the invention may also be designed to include Gram positive AI proteins from divergent serotypes or strain isolates, i.e., to include a first AI protein which is present in one collection of serotypes or strain isolates of a Gram positive bacteria and a second AI protein which is present in those serotypes or strain isolates not represented by the first AI protein.

[0734] For example, the invention may include an immunogenic composition comprising a first and second Gram positive bacteria AI protein, wherein a polynucleotide sequence encoding for the full length sequence of the first AI protein is not present in a similar Gram positive bacterial genome comprising a polynucleotide sequence encoding for the second AI protein.

[0735] The compositions of the invention may also be designed to include AI proteins from divergent GBS serotypes or strain isolates, i.e., to include a first AI protein which is present in one collection of GBS serotypes or strain isolates and a second AI protein which is present in those serotypes or strain isolates not represented by the first AI protein.

[0736] For example, the invention may include an immunogenic composition comprising a first and second GBS AI protein, wherein a polynucleotide sequence encoding for the full length sequence of the first GBS AI protein is not present in a genome comprising a polynucleotide sequence encoding for the second GBS AI protein. For example, the first AI protein could be GBS 80 (such as the GBS 80 sequence from GBS serotype V, strain isolate 2603). As previously discussed (and depicted in FIG. 2), the sequence for GBS 80 in GBS sertoype II, strain isolate 18RS21 is disrupted. In this instance, the second AI protein could be GBS 104 or GBS 67 (sequences selected from the GBS serotype II, strain isolate 18RS21).

[0737] Further, the the invention may include an immunogenic composition comprising a first and second GBS AI protein, wherein the first GBS AI protein has detectable surface exposure on a first GBS strain or serotype but not a second GBS strain or serotype and the second GBS AI protein has detectable surface exposure on a second GBS strain or serotype but not a first GBS strain or serotype. For example, the first AI protein could be GBS 80 and the second AI protein could be GBS 67. As seen in Table 15, there are some GBS serotypes and strains that have surface exposed GBS 80 but that do not have surface exposed GBS 67 and vice versa. An immunogenic composition comprising a GBS 80 and a GBS 67 protein may provide protection across a wider group of GBS strains and serotypes.

TABLE 15
Antigen surface exposure of GBS 80, GBS 322, GBS 104, and GBS 67

| | | | | | |
|---|---|---|---|---|---|
| GBS strains | Type | GBS 80 | GBS 322 | GBS 104 | GBS 67 |

| | | | | | |
|---|---|---|---|---|---|
| DK1* | Ia | 0 | nd | 237 | 478 |
| DK8* | | 0 | 213 | 151 | 475 |
| Davis* | | 0 | 86 | 271 | 430 |
| 515* | | 0 | 227 | 262 | 409 |
| 090 | | 0 | 0 | 0 | 0 |
| A909 | | 0 | 0 | 0 | 0 |
| 2986 | | 0 | 0 | 157 | 397 |
| 5551 | | 0 | 36 | 384 | 485 |
| 2177 | Ib | 477 | 323 | 328 | 66 |
| H36B* | | 0 | 105 | 518 | 444 |
| 7357b- | | 91 | 102 | 309 | 316 |
| 2129 | | 57 | 71 | 132 | 0 |
| 5518 | | 31 | nd | 60 | 28 |
| COH1 | III | 305 | 130 | 305 | 0 |
| D136C | | 16 | 460 | 226 | 406 |
| COH31 | | 0 | 479 | 71 | 273 |
| M732 | | 105 | 292 | 101 | 0 |
| M781 | | 65 | 224 | 136 | 0 |
| 1998 | | 95 | 288 | 205 | 350 |
| 5376 | | 165 | 76 | 156 | 0 |
| 5435 | | 93 | 88 | 100 | 0 |
| 18RS21 | II | 0 | 471 | 50 | 103 |
| DK21* | | 0 | 342 | 419 | 331 |
| 3050 | | 43 | 188 | 289 | 460 |
| 5401 | | 170 | 135 | 494 | 618 |
| 2141 | | 0 | 76 | 0 | 69 |
| CJB111 | V | 365 | 58 | 355 | 481 |
| 2603 | | 62 | 293 | 100 | 105 |
| 5364 | | 454 | 463 | 379 | 394 |
| 2110 | | 0 | 11 | 345 | 589 |
| 2274 | IV | 113 | 161 | 465 | 484 |
| 1999 | | 0 | 55 | 492 | 453 |
| 2210 | | 0 | 0 | 363 | 574 |
| 2928 | VII | 0 | 0 | 0 | 0 |
| SMU071 | VIII | 556 | 170 | 393 | 79 |
| JM9130013 | | 587 | 133 | 436 | 83 |
| 2189 | | 0 | 0 | 0 | 0 |
| 5408 | | 0 | 0 | 159 | 433 |
| CJB110 | NT | 71 | 587 | 169 | 245 |
| 1169* | | 0 | 213 | 371 | 443 |
| Δ Mean >100 | | 9/40 | 22/38 | 32/40 | 25/40 |
| | | 22% | 58% | 80% | 62% |

[0738] Alternatively, the invention may include an immunogenic composition comprising a first and second Gram positive bacteria AI protein, wherein the polynucleotide sequence encoding the sequence of the first AI protein is less than 90% (i.e., less than 90, 88, 86, 84, 82, 80, 78, 76, 74, 72, 70, 65, 60, 55, 50, 45, 40, 35 or 30 percent) homologous than the corresponding sequence in the genome of the second AI protein.

[0739] The invention may include an immunogenic composition comprising a first and second GBS AI protein, wherein the polynucleotide sequence encoding the sequence of the first GBS AI protein is less than 90% (i.e., less than 90, 88, 86, 84, 82, 80, 78, 76, 74, 72, 70, 65, 60, 55, 50, 45, 40, 35 or 30 percent) homologous than the corresponding sequence in the genome of the second GBS AI protein. For example, the first GBS AI protein could be GBS 67 (such as the GBS 67 sequence from GBS serotype 1b, strain isolate H36B). As shown in FIGS. 2 and 4, the GBS 67 sequence for this strain is less than 90% homologous (87%) to the corresponding GBS 67 sequence in GBS serotype V, strain isolate 2603. In this instance, the second GBS AI protein could then be the GBS 80 sequence from GBS serotype V, strain isolate 2603.

[0740] An example immunogenic composition of the invention may comprise adhesin island proteins GBS 80, GBS 104, GBS 67, and GBS 59, and non-AI protein GBS 322. FACS analysis of different GBS strains demonstrates that at least one of these five proteins is always found to be expressed on the surface of GBS bacteria. An initial FACS analysis of 70 strains of GBS bacteria, obtained from the CDC in the United States (33 strains), ISS in Italy (17 strains), and Houston/Harvard (20 strains), detected surface exposure of at least one of GBS 80, GBS 104, GBS 322, GBS 67, or GBS 59 on the surface of the GBS bacteria. FIG. 227 provides the FACS data obtained for surface exposure of GBS 80, GBS 104, GBS 67, GBS 322, and GBS 59 on each of 37 GBS strains. FIG. 228 provides the FACS data obtained for surface exposure of GBS 80, GBS 104, GBS 67, GBS 322, and GBS 59 on each of 41 GBS strains obtained from the CDC. As can be seen from FIGS. 227 and 228, each GBS strain had surface expression of at least one of GBS 80, GBS 104, GBS 67, GBS 322, and GBS 59. The surface exposure of at least one of these proteins on each bacterial strain indicates that an immunogenic composition comprising these proteins will provide wide protection across GBS strains and serotypes.

[0741] The surface exposed GBS 80, GBS 104, GBS 67, GBS 322, and GBS 59 proteins are also present at high levels as determined by FACS. Table 49 summarizes the FACS results for the initial 70 GBS strains examined for GBS 80, GBS 104, GBS 67, GBS 322, and GBS 59 surface expression. A protein was designated as having high levels of surface expression of a protein if a five-fold shift in fluorescence was observed when using antibodies for the protein relative to preimmune control serum.

TABLE 49
Exposure Levels of GBS 80, GBS 104, GBS 67, GBS 322, and GBS 59
on GBS Strains

| | GBS 80 | GBS 104 | GBS 67 | GBS 59 | GBS 322 |
|---|---|---|---|---|---|
| 5-fold shift in | 17/70 | 14/70 | 49/70 | 46/70 | 33/70 |
| fluorescence | 24% | 20% | 70% | 66% | 47% |
| by FACS | | | | | |

[0742] Table 50 details which of the surface proteins is highly expressed on the different GBS serotype.

TABLE 50
High Levels of Surface Protein Expression on GBS Serotypes

| 5-fold shift in | | | | | |
|---|---|---|---|---|---|
| fluorescence | | | | | |
| by FACS | GBS 80 | GBS 104 | GBS 67 | GBS 59 | GBS 322 |
| Ia + Ib + III | 4/36 | 2/36 | 22/36 | 20/36 | 18/36 |
| II + V | 11/25 | 9/25 | 21/25 | 21/25 | 13/25 |
| Others | 2/9 | 3/9 | 6/9 | 5/9 | 2/9 |

[0743] Alternatively, the immunogenic composition of the invention may include GBS 80, GBS 104, GBS 67, and GBS 322. Assuming that protein antigens that are highly accessible to antibodies confer 100% protection with suitable adjuvants, an immunogenic composition containing GBS 80, GBS 104, GBS 67, GBS 59 and GBS 322 will provide protection for 89% of GBS strains and serotypes, the same percentage as an immunogenic composition containing GBS 80, GBS 104, GBS 67, and GBS 322 proteins. See FIG. 229. However, it may be preferable to include GBS 59 in the composition to increase its immunogenic strength. As seen from Table 50, GBS 59 is highly expressed on the surface two-thirds of GBS bacteria examined by FACS analysis, unlike GBS 80, GBS 104, and GBS 322, which are highly expressed in less than half of GBS bacteria examined. GBS 59 opsonophagocytic activity is also comparable to that of a mix of GBS 322, GBS 104, GBS 67, and GBS 80 proteins. See FIG. 230.

[0744] By way of another example, preferably, the GAS AI proteins included in the immunogenic compositions of the invention can provide protection across more than one GAS serotype or strain isolate. For example, the immunogenic composition may comprise a first GAS AI protein, wherein the amino acid sequence of said AI protein is at least 90% (i.e., at least 90, 91, 92, 93, 94, 95, 96, 97, 98, 99 or 100%) homologous to the amino acid sequence of a second GAS AI protein, and wherein said first AI protein and said second AI protein are derived from the genomes of different GAS serotypes. The first GAS AI protein may also be homologous to the amino acid sequence of a third GAS AI protein, such that the first AI protein, the second AI protein and the third AI protein are derived from the genomes of different GAS serotypes. The first AI protein may also be homologous to the amino acid sequence of a fourth GAS AI protein, such that the first AI protein, the second AI protein and the third AI protein are derived from the genomes of different GAS serotypes.

[0745] The compositions of the invention may also be designed to include GAS AI proteins from divergent serotypes or strain isolates, i.e., to include a first AI protein which is present in one collection of serotypes or strain isolates of a GAS bacteria and a second AI protein which is present in those serotypes or strain isolates not represented by the first AI protein.

[0746] For example, the first AI protein could be a prtF2 protein (such as the 19224141 protein from GAS serotype M12, strain isolate A735). As previously discussed (and depicted in FIG. 164), the sequence for a prtF2 protein is not present in GAS AI types 1 or 2. In this instance, the second AI protein could be collagen binding protein M6_Spy0159 (from M6 isolate (MGAS10394), which comprises an AI-1) or GAS15 (from M1 isolate (SF370), which comprises an AI-2).

[0747] Further, the invention may include an immunogenic composition comprising a first and second GAS AI protein, wherein the first GAS AI protein has detectable surface exposure on a first GAS strain or serotype but not a second GAS strain or serotype and the second GAS AI protein has detectable surface exposure on a second GAS strain or serotype but not a first GAS strain or serotype.

[0748] The invention may include an immunogenic composition comprising a first and second GAS AI protein, wherein the polynucleotide sequence encoding the sequence of the first GAS AI protein is less than 90% (i.e., less than 90, 88, 86, 84, 82, 80, 78, 76, 74, 72, 70, 65, 60, 55, 50, 45, 40, 35 or 30 percent) homologous than the corresponding sequence in the genome of the second GAS AI protein. Preferably the first and second GAS AI proteins are subunits of the pilus. More preferably the first and second GAS AI proteins are selected from the major pilus forming proteins (i.e., M6_Spy0160 from M6 strain 10394, SPy0128 from M1 strain SF370, SpyM3_{—}0100 from M3 strain 315, SPs0102 from M3 strain SSI, orf80 from M5 isolate Manfredo, spyM18_{—}0128 from M18 strain 8232, SpyoM01000153 from M49 strain 591, 19224137 from M12 strain A735, fimbrial structural subunit from M77 strain ISS4959, fimbrial structural subunit from M44 strain ISS3776, fimbrial structural subunit from M50 strain ISS3776 ISS 4538, fimbrial structural subunit from M12 strain CDC SS635, fimbrial structural subunit from M23 strain DSM2071, fimbrial structural subunit from M6 strain CDC SS410). Table 45 provides the percent identity between the amino acidic sequences of each of the main pilus forming subunits from GAS AI-1, AI-2, AI-3, and AI-4 representative strains (i.e., M6_Spy0160 from M6 strain 10394, SPy0128 from M1 strain SF370, SpyM3_{—}0100 from M3 strain 315, SPs0102 from M3 strain SSI, orf80 from M5 isolate Manfredo, spyM18_{—}0128 from M18 strain 8232, SpyoM01000153 from M49 strain 591, 19224137 from M12 strain A735, Fimbrial structural subunit from M77 strain ISS4959, fimbrial structural subunit from M44 strain ISS3776, fimbrial structural subunit from M50 strain ISS3776 ISS 4538, fimbrial structural subunit from M12 strain CDC SS635, fimbrial structural subunit from M23 strain DSM2071, fimbrial structural subunit from M6 strain CDC SS410).

TABLE 45
Comparison of Amino Acid Sequences of Major Pilus Proteins in the Four GAS
AIs

[chemical structure]

[0749] For example, the first main pilus subunit may be selected from bacteria of GAS serotype M6 strain 10394 and the second main pilus subunit may be selected from bacteria of GAS serotype M1 strain 370. As can be seen from Table 45, the main pilus subunits encoded by these strains of bacteria share only 23% nucleotide identity. An immunogenic composition comprising pilus main subunits from each of these strains of bacteria is expected to provide protection across a wider group of GAS strains and serotypes. Other examples of main pilus subunits that can be used in combination to provide increased protection across a wider range of GAS strains and serotypes include proteins encoded by GAS serotype M5 Manfredo isolate and serotype M6 strain 10394, which share 23% sequence identity, GAS serotype M18 strain 8232 and serotype M1 strain 370, which share 38% sequence identity, GAS serotype M3 strain 315 and serotype M12 strain A735, which share 61% sequence identity, and GAS serotype M3 strain 315 and serotype M6 strain 10394 which share 25% sequence identity.

[0750] As also can be seen from Table 45, the amino acid sequences of the four types of main pilus subunits present in GAS are relatively divergent. FIGS. 198-201 provide further tables comparing the percent identity of adhesin island-encoded surface exposed proteins for different GAS serotypes relative to other GAS serotypes harbouring an adhesin island of the same or a different subtype (GAS AI-1, GAS AI-2, GAS AI-3, and GAS AI-4). See also further discussion below.

[0751] Immunizations with the Adhesin Island proteins of the invention are discussed further in the Examples.

Co-Expression of GBS Adhesin Island Proteins and Role of GBS AI Proteins in Surface Presentation

[0752] In addition to the use of the GBS adhesin island proteins for cross strain and cross serotype protection, Applicants have identified interactions between adhesin island proteins which appear to affect the delivery or presentation of the surface proteins on the surface of the bacteria.

[0753] In particular, Applicants have discovered that surface exposure of GBS 104 is dependent on the concurrent expression of GBS 80. As discussed further in Example 2, reverse transcriptase PCR analysis of AI-1 shows that all of the AI genes are co-transcribed as an operon. Applicants constructed a series of mutant GBS containing in frame deletions of various AI-1 genes. (A schematic of the GBS mutants is presented in FIG. 7). FACS analysis of the various mutants comparing mean shift values using anti-GBS 80 versus anti-GBS 104 antibodies is presented in FIG. 8. Removal of the GBS 80 operon prevented surface exposure of GBS 104; removal of the GBS 104 operon did not affect surface exposure of GBS 80. While not being limited to a specific theory, it is thought that GBS 80 is involved in the transport or localization of GBS 104 to the surface of the bacteria. The two proteins may be oligomerized or otherwise associated. It is possible that this association involves a conformational change in GBS 104 that facilitates its transition to the surface of the GBS bacteria.

[0754] Pili structures that comprise GBS 104 appear to be of a lower molecular weight than pili structures lacking GBS 104. FIG. 68 shows that polyclonal anti-GBS 104 antibodies (see lane marked α-104 POLIC.) cross-hybridize with smaller structures than do polyclonal anti-GBS 80 antibodies (see lane marked α-GBS 80 POLIC.).

[0755] In addition, Applicants have shown that removal of GBS 80 can cause attenuation, further suggesting the protein contributes to virulence. As described in more detail in Example 3, the LD₅₀'s for the Δ80 mutant and the Δ80, Δ104 double mutant were reduced by an order of magnitude compared to wildtype and Δ104 mutant.

[0756] The sortases within the adhesin island also appear to play a role in localization and presentation of the surface proteins. As discussed further in Example 4, FACS analysis of various sortase deletion mutants showed that removal of sortase SAG0648 prevented GBS 104 from reaching the surface and slightly reduced the surface exposure of GBS 80. When sortase SAG0647 and sortase SAG0648 were both knocked out, neither GBS 80 nor GBS 104 were surface exposed. Expression of either sortase alone was sufficient for GBS 80 to arrive at the bacterial surface. Expression of SAG0648, however, was required for GBS 104 surface localization.

[0757] Accordingly, the compositions of the invention may include two or more AI proteins, wherein the AI proteins are physically or chemically associated. For example, the two AI proteins may form an oligomer. In one embodiment, the associated proteins are two AI surface proteins, such as GBS 80 and GBS 104. The associated proteins may be AI surface proteins from different adhesin islands, including host cell adhesin island proteins if the AI surface proteins are expressed in a recombinant system. For example, the associated proteins may be GBS 80 and GBS 67.

Adhesin Island Proteins from Other Gram Positive Bacteria

[0758] Applicants' identification and analysis of the GBS adhesin islands and the immunological and biological functions of these AI proteins and their pilus structures provides insight into similar structures in other Gram positive bacteria.

[0759] As discussed above, “Adhesin Island” or “AI” refers to a series of open reading frames within a bacterial genome that encode for a collection of surface proteins and sortases. An Adhesin Island may encode for amino acid sequences comprising at least one surface protein. The Adhesin Island may encode at least one surface protein. Alternatively, an Adhesin Island may encode for at least two surface proteins and at least one sortase. Preferably, an Adhesin Island encodes for at least three surface proteins and at least two sortases. One or more of the surface proteins may include an LPXTG motif (such as LPXTG (SEQ ID NO: 122)) or other sortase substrate motif. One or more AI surface proteins may participate in the formation of a pilus structure on the surface of the Gram positive bacteria.

[0760] Gram positive adhesin islands of the invention preferably include a divergently transcribed transcriptional regulator. The transcriptional regulator may regulate the expression of the AI operon.

[0761] The invention includes a composition comprising one or more Gram positive bacteria AI surface proteins. Such AI surface proteins may be associated in an oligomeric or hyperoligomeric structure.

[0762] Preferred Gram positive adhesin island proteins for use in the invention may be derived from Staphylococcus (such as S. aureus), Streptococcus (such as S. agalactiae (GBS), S. pyogenes (GAS), S. pneumonaie, S. mutans), Enterococcus (such as E. faecalis and E. faecium), Clostridium (such as C. difficile), Listeria (such as L. monocytogenes) and Corynebacterium (such as C. diphtheria).

[0763] One or more of the Gram positive AI surface protein sequences typically include an LPXTG motif or other sortase substrate motif. Gram positive AI surface proteins of the invention may affect the ability of the Gram positive bacteria to adhere to and invade epithelial cells. AI surface proteins may also affect the ability of Gram positive bacteria to translocate through an epithelial cell layer. Preferably, one or more AI surface proteins are capable of binding to or otherwise associating with an epithelial cell surface. Gram positive AI surface proteins may also be able to bind to or associate with fibrinogen, fibronectin, or collagen.

[0764] Gram positive AI sortase proteins are predicted to be involved in the secretion and anchoring of the LPXTG containing surface proteins. A Gram positive bacteria AI may encode for at least one surface exposed protein. The Adhesin Island may encode at least one surface protein. Alternatively, a Gram positive bacteria AI may encode for at least two surface exposed proteins and at least one sortase. Preferably, a Gram positive AI encodes for at least three surface exposed proteins and at least two sortases.

[0765] Gram positive AI surface proteins may be covalently attached to the bacterial cell wall by membrane-associated transpeptidases, such as an AI sortase. The sortase may function to cleave the surface protein, preferably between the threonine and glycine residues of an LPXTG motif. The sortase may then assist in the formation of an amide link between the threonine carboxyl group and a cell wall precursor such as lipid II. The precursor can then be incorporated into the peptidoglycan via the transglycoslylation and transpeptidation reactions of bacterial wall synthesis. See Comfort et al., Infection & Immunity (2004) 72(5): 2710-2722. Typically, Gram positive bacteria AI surface proteins of the invention will contain an N-terminal leader or secretion signal to facilitate translocation of the surface protein across the bacterial membrane.

[0766] Gram positive bacteria AI surface proteins of the invention may affect the ability of the Gram positive bacteria to adhere to and invade target host cells, such as epithelial cells. Gram positive bacteria AI surface proteins may also affect the ability of the gram positive bacteria to translocate through an epithelial cell layer. Preferably, one or more of the Gram positive AI surface proteins are capable of binding to or other associating with an epithelial cell surface. Further, one or more Gram positive AI surface proteins may bind to fibrinogen, fibronectin, or collagen protein.

[0767] In one embodiment, the invention includes a composition comprising oligomeric, pilus-like structures comprising a Gram positive bacteria AI surface protein. The oligomeric, pilus-like structure may comprise numerous units of the AI surface protein. Preferably, the oligomeric, pilus-like structures comprise two or more AI surface proteins. Still more preferably, the oligomeric, pilus-like structure comprises a hyper-oligomeric pilus-like structure comprising at least two (e.g., 2, 3, 4, 5, 6, 7, 8, 9, 10, 11, 12, 13, 14, 15, 20, 25, 30, 35, 40, 45, 50, 60, 70, 80, 90, 100, 120, 140, 150, 200 or more) oligomeric subunits, wherein each subunit comprises an AI surface protein or a fragment thereof. The oligomeric subunits may be covalently associated via a conserved lysine within a pilin motif. The oligomeric subunits may be covalently associated via an LPXTG motif, preferably, via the threonine amino acid residue.

[0768] Gram positive bacteria AI surface proteins or fragments thereof to be incorporated into the oligomeric, pilus-like structures of the invention will preferably include one or both of a pilin motif comprising a conserved lysine residue and an E box motif comprising a conserved glutamic acid residue.

[0769] The oligomeric, pilus like structures may be used alone or in the combinations of the invention. In one embodiment, the invention comprises a Gram positive bacteria Adhesin Island in oligomeric form, preferably in a hyperoligomeric form.

[0770] The oligomeric, pilus-like structures of the invention may be combined with one or more additional Gram positive AI proteins (from the same or a different Gram positive species or genus). In one embodiment, the oligomeric, pilus-like structures comprise one or more Gram positive bacteria AI surface proteins in combination with a second Gram positive bacteria protein. The second Gram positive bacteria protein may be a known antigen, and need not normally be associated with an AI protein.

[0771] The oligomeric, pilus-like structures may be isolated or purified from bacterial cultures overexpressing a Gram positive bacteria AI surface protein. The invention therefore includes a method for manufacturing an oligomeric Adhesin Island surface antigen comprising culturing a Gram positive bacteria adapted for increased AI protein expression and isolation of the expressed oligomeric Adhesin Island protein from the Gram positive bacteria. The AI protein may be collected from secretions into the supernatant or it may be purified from the bacterial surface. The method may further comprise purification of the expressed Adhesin Island protein. Preferably, the Adhesin Island protein is in a hyperoligomeric form.

[0772] Gram positive bacteria are preferably adapted to increase AI protein expression by at least two (e.g., 2, 3, 4, 5, 8, 10, 15, 20, 25, 30, 35, 40, 45, 50, 60, 70, 80, 90, 100, 125, 150 or 200) times wild type expression levels.

[0773] Gram positive bacteria may be adapted to increase AI protein expression by means known in the art, including methods of increasing gene dosage and methods of gene upregulation. Such means include, for example, transformation of the Gram positive bacteria with a plasmid encoding the AI protein. The plasmid may include a strong promoter or it may include multiple copies of the sequence encoding the AI protein. Optionally, the sequence encoding the AI protein within the Gram positive bacterial genome may be deleted. Alternatively, or in addition, the promoter regulating the Gram positive Adhesin Island may be modified to increase expression.

[0774] The invention further includes Gram positive bacteria which have been adapted to produce increased levels of AI surface protein. In particular, the invention includes Gram positive bacteria which have been adapted to produce oligomeric or hyperoligomeric AI surface protein. In one embodiment, the Gram positive bacteria of the invention are inactivated or attenuated to permit in vivo delivery of the whole bacteria, with the AI surface protein exposed on its surface.

[0775] The invention further includes Gram positive bacteria which have been adapted to have increased levels of expressed AI protein incorporated in pili on their surface. The Gram positive bacteria may be adapted to have increased exposure of oligomeric or hyperoligomeric AI proteins on its surface by increasing expression levels of a signal peptidase polypeptide. Increased levels of a local signal peptidase expression in Gram positive bacteria (such us LepA in GAS) are expected to result in increased exposure of pili proteins on the surface of Gram positive bacteria. Increased expression of a leader peptidase in Gram positive may be achieved by any means known in the art, such as increasing gene dosage and methods of gene upregulation. The Gram positive bacteria adapted to have increased levels of leader peptidase may additionally be adapted to express increased levels of at least one pili protein.

[0776] Alternatively, the AI proteins of the invention may be expressed on the surface of a non-pathogenic Gram positive bacteria, such as Streptococus gordonii (See, e.g., Byrd et al., “Biological consequences of antigen and cytokine co-expression by recombinant Streptococcus gordonii vaccine vectors”, Vaccine (2002) 20:2197-2205) or Lactococcus lactis (See, e.g., Mannam et al., “Mucosal VaccineMade from Live, Recombinant Lactococcus lactis Protects Mice against Pharangeal Infection with Streptococcus pyogenes” Infection and Immunity (2004) 72(6):3444-3450). It has already been demonstrated, above, that L. lactis expresses GBS and GAS AI polypeptides in oligomeric form and on its surface.

[0777] Alternatively, the oligomeric, pilus-like structures may be produced recombinantly. If produced in a recombinant host cell system, the Gram positive bacteria AI surface protein will preferably be expressed in coordination with the expression of one or more of the AI sortases of the invention. Such AI sortases will facilitate oligomeric or hyperoligomeric formation of the AI surface protein subunits.

[0778] Gram positive AI Sortases of the invention will typically have a signal peptide sequence within the first 70 amino acid residues. They may also include a transmembrane sequence within 50 amino acid residues of the C terminus. The sortases may also include at least one basic amino acid residue within the last 8 amino acids. Preferably, the sortases have one or more active site residues, such as a catalytic cysteine and histidine.

[0779] Adhesin island surface proteins from two or more Gram positive bacterial genus or species may be combined to provide an immunogenic composition for prophylactic or therapeutic treatment of disease or infection of two more Gram positive bacterial genus or species. Optionally, the adhesin island surface proteins may be associated together in an oligomeric or hyperoligomeric structure.

[0780] In one embodiment, the invention comprises an adhesin island surface proteins from two or more Streptococcus species. For example, the invention includes a composition comprising a GBS AI surface protein and a GAS adhesin island surface protein. As another example, the invention includes a composition comprising a GAS adhesin island surface protein and a S. pneumoniae adhesin island surface protein.

[0781] In one embodiment, the invention comprises an adhesin island surface protein from two or more Gram positive bacterial genus. For example, the invention includes a composition comprising a Streptococcus adhesin island protein and a Corynebacterium adhesin island protein.

[0782] Examples of AI sequences in several Gram positive bacteria are discussed further below.

Streptococcus pyogenes (GAS)

[0783] As discussed above, Applicants have identified at least four different GAS Adhesin Islands. These adhesion islands are thought to encode surface proteins which are important in the bacteria's virulence, and Applicants have obtained the first electron micrographs revealing the presence of these adhesin island proteins in hyperoligomeric pilus structures on the surface of Group A Streptococcus.

[0784] Group A Streptococcus is a human specific pathogen which causes a wide variety of diseases ranging from pharyngitis and impetigo through life threatening invasive disease and necrotizing fasciitis. In addition, post-streptococcal autoimmune responses are still a major cause of cardiac pathology in children.

[0785] Group A Streptococcal infection of its human host can generally occur in three phases. The first phase involves attachment and/or invasion of the bacteria into host tissue and multiplication of the bacteria within the extracellular spaces. Generally this attachment phase begins in the throat or the skin. The deeper the tissue level infected, the more severe the damage that can be caused. In the second stage of infection, the bacteria secrete a soluble toxin that diffuses into the surrounding tissue or even systemically through the vasculature. This toxin binds to susceptible host cell receptors and triggers innappropropriate immune responses by these host cells, resulting in pathology. Because the toxin can diffuse throughout the host, the necrosis directly caused by the GAS toxins may be physically located in sites distant from the bacterial infection. The final phase of GAS infection can occur long after the original bacteria have been cleared from the host system. At this stage, the host's previous immune response to the GAS bacteria due to cross reactivity between epitopes of a GAS surface protein, M, and host tissues, such as the heart. A general review of GAS infection can be found in Principles of Bacterial Pathogeneis, Groisman ed., Chapter 15 (2001).

[0786] In order to prevent the pathogenic effects associated with the later stages of GAS infection, an effective vaccine against GAS will preferably facilitate host elimination of the bacteria during the initial attachment and invasion stage.

[0787] Isolates of Group A Streptococcus are historically classified according to the M surface protein described above. The M protein is surface exposed trypsin-sensitive protein generally comprising two polypeptide chains complexed in an alpha helical formation. The carboxyl terminus is anchored in the cytoplasmic membrane and is highly conserved among all group A streptococci. The amino terminus, which extends through the cell wall to the cell surface, is responsible for the antigenic variability observed among the 80 or more serotypes of M proteins.

[0788] A second layer of classification is based on a variable, trypsin-resistant surface antigen, commonly referred to as the T-antigen. Decades of epidemiology based on M and T serological typing have been central to studies on the biological diversity and disease causing potential of Group A Streptococci. While the M-protein component and its inherent variability have been extensively characterized, even after five decades of study, there is still very little known about the structure and variability of T-antigens. Antisera to define T types are commercially available from several sources, including Sevapharma (http://www.sevapharma.cz/en).

[0789] The gene coding for one form of T-antigen, T-type 6, from an M6 strain of GAS (D741) has been cloned and characterized and maps to an approximately 11 kb highly variable pathogenicity island. Schneewind et al., J. Bacteriol. (1990) 172(6):3310-3317. This island is known as the Fibronectin-binding, Collagen-binding T-antigen (FCT) region because it contains, in addition to the T6 coding gene (tee6), members of a family of genes coding for Extra Cellular Matrix (ECM) binding proteins. Bessen et al., Infection & Immunity (2002) 70(3):1159-1167. Several of the protein products of this gene family have been shown to directly bind either fibronectin and/or collagen. See Hanski et al., Infection & Immunity (1992) 60(12):5119-5125; Talay et al., Infection & Immunity (1992(60(9):3837-3844; Jaffe et al. (1996) 21(2):373-384; Rocha et al., Adv Exp Med Biol. (1997) 418:737-739; Kreikemeyer et al., J Biol Chem (2004) 279(16):15850-15859; Podbielski et al., Mol. Microbiol. (1999) 31(4):1051-64; and Kreikemeyer et al., Int. J. Med Microbiol (2004) 294(2-3):177-88. In some cases direct evidence for a role of these proteins in adhesion and invasion has been obtained.

[0790] Applicants raised antiserum against a recombinant product of the tee6 gene and used it to explore the expression of T6 in M6 strain ISS3650. In immunoblot of mutanolysin extracts of this strain, the antiserum recognized, in addition to a band corresponding to the predicted molecular mass of the tee6 gene product, very high molecular weight ladders ranging in mobility from about 100 kDa to beyond the resolution of the 3-8% gradient gels used. See FIG. 163A, last lane labeled “M6 Tee6.”

[0791] This pattern of high molecular weight products is similar to that observed in immunoblots of the protein components of the pili identified in Streptococcus agalactiae (described above) and previously in Corynebacterium diphtheriae. Electron microscropy of strain M6 ISS3650 with antisera specific for the product of tee6 revealed abundant surface staining and long pilus like structures extending up to 700 nanometers from the bacterial surface, revealing that the T6 protein, one of the antigens recognized in the original Lancefield serotyping system, is located within a GAS Adhesin Island (GAS AI-1) and forms long covalently linked pilus structures. See FIG. 163I.

[0792] In addition to the tee6 gene, the FCT region in M6_ISS3650 (GAS AI-1) contains two other genes (prtF1 and cpa) predicted to code for surface exposed proteins; these proteins are characterized as containing the cell wall attachment motif LPXTG. Western blot analysis using antiserum specific for PrtF1 detected a single molecular species with electrophoretic mobility corresponding to the predicted molecular mass of the protein and one smaller band of unknown origin. Western blot analysis using antisera specific for Cpa recognized a high molecular weight covalently linked ladder (FIG. 163A, second lane). Immunogold labelling of Cpa with specific antiserum followed by transmission electron microscopy detected an abundance of Cpa at the cell surface and only occasional structures extending from the cell surface (FIG. 163J).

[0793] Four classes of FCT region can be discerned by the types and order of the genes contained within the region. The FCT region of strains of types M3, M5, M18 and M49 have a similar organization whereas those of M6, M1 and M12 differ. See FIG. 164. As discussed below, these four FCT regions correlate to four GAS Adhesin Island types (AI-1, AI-2, AI-3 and AI-4).

[0794] Applicants discovery of genes coding for pili in the FCT region of strain M6_ISS3650 prompted them to examine the predicted surface exposed proteins in the variant FCT regions of three other GAS strains of having different M-type (M1_SF370, M5_ISS4883 and M12_{—}20010296) representing the other three FCT variants. Each gene present in the FCT region of each bacteria was cloned and expressed. Antisera specific for each recombinant protein was then used to probe mutanolysin extracts of the respective strains (6). In M1 strain SF370, there are three predicted surface proteins (Cpa (also referred to as M1_{—}126 and GAS 15), M1_{—}128 (a fimbrial protein also referred to as Spy0128 and GAS 16), and M1_{—}130 (also referred to as Spy0130 and GAS 18)) (GAS AI-2). Antisera specific for each surface protein reacted with a ladder of high molecular weight material (FIG. 163B). Immunogold staining of M1 strain SF370 with antiserum specific for M1_{—}128 revealed pili structures similar to those seen when M6 strain ISS3650 was immunogold stained with antiserum specific for tee6 (See FIG. 1163K). Antisera specific for surface proteins Cpa and M1_{—}130 revealed abundant surface staining and occasional structures extending from the surface of M1 strain SF370 bacteria (FIG. 163S).

[0795] The M1_{—}128 protein appears to be necessary for polymerization of Cpa and M1_{—}130 proteins. If the M1_{—}128 gene in M1_SF370 was deleted, Western blot analysis using antibodies that hybridize to Cpa and M1_{—}130 no longer detected high molecular weight ladders comprising the Cpa and M1_{—}130 proteins (FIG. 163 E). See also FIGS. 177 A-C which provide the results of Western blot analysis of the M1_{—}128 (Δ128) deleted bacteria using anti-M1_{—}130 antiserum (FIG. 177 A), anti-M1_{—}128 antiserum (FIG. 177 B), and anti-M1_{—}126 antiserum (FIG. 177 C). High molecular weight ladders, indicative of pilus formation on the surface of M1 strain SF370, could not be detected by any of the three antisera in Δ128 bacteria. If the Δ128 bacteria were transformed with a plasmid containing the gene for M1_{—}128, Western blot analysis using antisera specific for Cpa and M1_{—}130 again detected high molecular weight ladders (FIG. 163 H).

[0796] In agreement with the Western blot analysis, immunoelectron microscopy failed to detect pilus assembly on the Δ128 strain SF370 bacteria using M1_{—}128 antisera (FIG. 178 B). Although Δ128 SF370 bacteria were unable to form pili, M1_{—}126 (cpa) and M1_{—}130, which contain sortase substrate motifs, were present on the bacteria's surface. FACS analysis of the M1_{—}128 deleted (Δ128) strain SF370 bacteria also detected both M1_{—}126 and M1_{—}130 on the surface of the Δ128 strain SF370 bacteria. See FIG. 179 D and F, which show a shift in fluorescence when antibodies immunoreactive to M1_{—}126 and M1_{—}130 are used on Δ128 bacteria. As expected, virtually no shift in fluorescence is observed when antibodies immunoreactive to M1_{—}128 are used with the Δ128 bacteria (FIG. 179 E).

[0797] By contrast, deletion of the M1_{—}130 gene did not effect polymerization of M1_{—}128 (FIG. 163 F). See also FIGS. 177 A-C, which provide Western blot analysis results of the M1_{—}130 deleted (Δ130) strain SF370 bacteria using anti-M1_{—}130 (FIG. 177 A), anti-M1_{—}128 (FIG. 177 B), and anti-M1_{—}126 antiserum (FIG. 177 C). The anti-M1_{—}128 and anti-M1_{—}126 antiserum both detected the presence of high molecular weight ladders in the A130 strain SF370 bacteria, indicating that the A130 bacteria form pili that comprise M1_{—}126 and M1_{—}128 polypeptides in the absence of M1_{—}130. As expected, the Western blot probed with antiserum immunoreactive with M1_{—}130 did not detect any proteins for the Δ130 bacteria (FIG. 177A).

[0798] Hence, the composition of the pili in GAS resembles that previously described for both C. diphtheria (7, 8) and S. agalactiae (described above) (9) in that each pilus is formed by a backbone component which abundantly stains the pili in EM and is essential for the incorporation of the other components.

[0799] Also similar to C. diphtheria, elimination of the srtC1 gene from the FCT region of M1_SF370 abolished polymerization of all three proteins and assembly of pili (FIG. 163 G). See also FIGS. 177 A-C, which provide Western blot analysis of the SrtC1 deleted (ΔsrtC1) strain SF370 bacteria using anti-M1_{—}130 (FIG. 177 A), anti-M1_{—}128 (FIG. 177 B), and anti-M1_{—}126 antiserum (FIG. 177 C). None of the three antisera immunoreacted with high molecular weight structures (pili) in the ΔSrtC1 bacteria. Confirming that deletion of the SrtC1 gene abrogates pilus assembly in strain SF370, immunoelectron microscopy using antisera against M1_{—}128 failed to detect pilus formation on the bacteria surface. See FIG. 178 C. Although no assembled pili were detected on ΔSrtC1 SF370, M1_{—}128 proteins could be detected on the surface of SF370. Thus, it appeared that SrtC1 deletion prevented pilus assembly on the surface of the SF370 bacteria, but not anchoring of the proteins that comprise pili to the bacterial cell wall. FACS analysis of the ΔSrtC1 strain SF370 confirmed that deletion of SrtC1 does not eliminate cell surface expression of M1_{—}126, M1_{—}128 or M1_{—}130. See FIG. 179 G-I, which show a shift in fluorescence when antibodies immunoreactive to M1_{—}126 (FIG. 179 G), M1_{—}128 (FIG. 179 H), and M1_{—}130 (FIG. 179 I) are used to detect cell surface protein expression on ΔSrtC1 bacteria. Thus, SrtC1 deletion prevents pilus formation, but not surface anchoring of proteins involved in pilus formation on the surface of bacteria. Another sortase is possibly involved in anchoring of the proteins to the bacteria surface. Pilus polymerization in C. diphtheriae is also dependent on particular sortase enzyme whose gene resides at the same genetic locus as the pilus components (7, 8).

[0800] The LepA signal peptidase, Spy0127, also appears to be essential for pilus assembly in strain SF370. LepA deletion mutants (ΔLepA) of strain SF370 fail to assemble pili on the cell surface. Not only are the ΔLepA mutants unable to assemble pili, they are also deficient at cell surface M1 expression. See FIG. 180, which provides a FACS analysis of the wildtype (A) and ΔLepA mutant (B) SF370 bacteria using M1 antisera. No shift in fluorescence is observed for the ΔLepA mutant bacteria in the presence of M1 immune serum. It is possible that these deletion mutants of LepA will be useful for detecting non-M, non-pili, surface exposed antigens on the surface of GAS, or any Gram positive bacteria. These antigens may also be useful in immunogenic compositions.

[0801] Pili were also observed in M5 strain ISS4882 and M12 strain 20010296. The M5 strain ISS4882 contains genes for four predicted surface exposed proteins (GAS AI-3). Antisera against three of the four products of the FCT region (GAS AI-3) of M5_ISS4883 (Cpa, M5_orf80, M5_orf82) stained high molecular weight ladders in Western blot analysis (FIG. 163 C). Long pili were visible when antisera against M5_orf80 was used in immunogold staining followed by electron microscopy (FIG. 163L).

[0802] The M12 strain 20010296 contains genes for five predicted surface exposed proteins. (GAS AI-4) Antisera against three of the five products of the FCT region (GAS AI-4) of M12_{—}20010296 (Cpa, EftLSL.A, Orf2) stained high molecular weight ladders in Westen blot analysis (FIG. 163 D). Long pili were visible when antisera against EftLSL.A were used (FIG. 163M).

[0803] The major pilus forming proteins identified in the four strains studied by applicants (T6, M1_{—}128, M5_orf80 and EftLSL.A) share between 23% and 65% amino acid identity in any pairwise comparison, indicating that each pilus may represent a different Lancefield T-antigen. Each pilus is part of a trypsin resistant structure on the GAS bacteria surface, as is the case for the Lancefield T antigens. See FIG. 165, which provides a FACS analysis of bacteria harboring each of the FCT types that had or had not been treated with trypsin (6). Following treatment, surface expression of the pilus proteins was assayed by indirect immunofluorescence and flow cytometry using antibodies specific for the pilus proteins, the bacteria's respective M proteins, or surface proteins not associated with the pili (FIG. 165). Staining the cells with sera specific for proteins associated with the pili was not effected by trypsin treatment, whereas trypsin treatment substantially reduced detection of M-proteins or surface proteins not associated with pili.

[0804] The pili structures identified on the surface of the GAS bacteria were confirmed to be Lancefield T antigens when commercially available T-serotyping sera detected the pili on the surface of bacteria. Western blot analysis was initially performed to determine if polyvalent serum pools (designated T, U, W, X, and Y) could detect recombinant proteins for each of the major pilis components (T6, M1_{—}128, M5_orf80 and EftLSL.A) identified in the strains of bacteria discussed above. Pool U, which contains the T6 serum, recognized the T6 protein specifically (a surface exposed pilus protein from GAS AI-1) (FIG. 166 B). Pool T specifically recognized M1_{—}128 (a surface exposed pilus protein from GAS AI-2) (FIG. 166 A). Pool W recognized both M5_orf80 and EftLSL.A (FIG. 166 C). Using monovalent sera representative of each of the components of each polyvalent pool, applicants confirmed the specificity of the T6 antigen (corresponding to a surface exposed pilus protein from GAS AI-1) (FIG. 166 E) and identified M1_{—}28 as antigen T1 (corresponding to a surface exposed pilus protein from GAS AI-2) (FIG. 166 D), EftLSL.A as antigen T12 (corresponding to a surface exposed pilus protein from GAS AI-4) (FIG. 166 G) and M5_orf80 as a common antigen recognized by the related sera T5, T27 and T44 (corresponding to a surface exposed pilus protein from GAS AI-3).

[0805] Confirming applicants observations, discussed above, that deleting the M1_{—}128 gene from M1_SF370 abolishes pilus formation, the pool T sera stained whole M1_SF370 bacteria (FIG. 166 H) but failed to stain M1_SF370 bacteria lacking the M1_{—}128 gene (FIG. 166 I).

[0806] As discussed above, Applicants have identified at least four different Group A Streptococcus Adhesin Islands. While these GAS AI sequences can be identified in numerous M types, Applicants have surprisingly discovered a correlation between the four main pilus subunits from the four different GAS AI types and specific T classifications. While other trypsin-resistant surface exposed proteins are likely also implicated in the T classification designations, the discovery of the role of the GAS adhesin islands (and the associated hyper-oligomeric pilus like structures) in T classification and GAS serotype variance has important implications for prevention and treatment of GAS infections. Applicants have identified protein components within each of the GAS adhesin islands which are associated with the pilus formation. These proteins are believed to be involved in the bacteria's initial adherence mechanisms. Immunological recognition of these proteins may allow the host immune response to slow or prevent the bacteria's transition into the more pathogenic later stages of infection. In addition, the GAS pili may be involved in formation of biofilms. Applicants have discovered that the GBS pili structures appear to be implicated in the formation of biofilms (populations of bacteria growing on a surface, often enclosed in an exopolysaccharide matrix). Biofilms are generally associated with bacterial resistance, as antibiotic treatments and host immune response are frequently unable to erradicate all of the bacteria components of the biofilm. Direction of a host immune response against surface proteins exposed during the first steps of bacterial attachment (i.e., before complete biofilm formation) is preferable.

[0807] The invention therefore provides for improved immunogenic compositions against GAS infection which may target GAS bacteria during their initial attachment efforts to the host epithelial cells and may provide protection against a wide range of GAS serotypes. The immunogenic compositions of the invention include GAS AI surface proteins which may be formulated in an oligomeric, or hyperoligomeric (pilus) form. The invention also includes combinations of GAS AI surface proteins. Combinations of GAS AI surface proteins may be selected from the same adhesin island or they may be selected from different GAS adhesin islands.

[0808] The invention comprises compositions comprising a first GAS AI protein and a second GAS AI protein wherein the first and second GAS AI proteins are derived from different GAS adhesin islands. For example, the invention includes a composition comprising at least two GAS AI proteins wherein the GAS AI proteins are encoded by the adhesin islands selected from the group consisting of GAS AI-1 and AI-2; GAS AI-1 and GAS AI-3; GAS AI-1 and GAS AI-4; GAS AI-2 and GAS AI-3; GAS AI-2 and GAS AI-4; and GAS AI-3 and GAS AI-4. Preferably the two GAS AI proteins are derived from different T-types.

[0809] A schematic arrangement of GAS Adhesin Island sequences is set forth in FIG. 162. In all strains, the AI region is flanked by the highly conserved open reading frames M1_{—}123 and M1-136. Between three and five genes in each locus code for surface proteins containing LPXTG motifs. These surface proteins also all belong to the family of genes coding for ECM binding adhesins.

[0810] Adhesin island sequences can be identified in numerous M types of Group A Streptococcus. Examples of AI sequences within M1, M6, M3, M5, M12, M18, and M49 serotypes are discussed below.

[0811] GAS Adhesin Islands generally include a series of open reading frames within a GAS genome that encode for a collection of surface proteins and sortases. A GAS Adhesin Island may encode for amino acid sequences comprising at least one surface protein. Alternatively, a GAS Adhesin Island may encode for at least two surface proteins and at least one sortase. Preferably, a GAS Adhesin Island encodes for at least three surface proteins and at least two sortases. One or more of the surface proteins may include an LPXTG motif (such as LPXTG (SEQ ID NO: 122)) or other sortase substrate motif. One or more GAS AI surface proteins may participate in the formation of a pilus structure on the surface of the Gram positive bacteria.

[0812] GAS Adhesin Islands of the invention preferably include a divergently transcribed transcriptional regulator. The transcriptional regulator may regulate the expression of the GAS AI operon. Examples of transcriptional regulators found in GAS AI sequences include RofA and Nra.

[0813] The GAS AI surface proteins may bind or otherwise adhere to fibrinogen, fibronectin, or collagen. One or more of the GAS AI surface proteins may comprise a fimbrial structural subunit.

[0814] One or more of the GAS AI surface proteins may include an LPXTG motif or other sortase substrate motif. The LPXTG motif may be followed by a hydrophobic region and a charged C terminus, which are thought to retard the protein in the cell membrane to facilitate recognition by the membrane-localized sortase. See Barnett, et al., J. Bacteriology (2004) 186 (17): 5865-5875.

[0815] GAS AI sequences may be generally categorized as Type 1, Type 2, Type 3, or Type 4, depending on the number and type of sortase sequences within the island and the percentage identity of other proteins (with the exception of RofA and cpa) within the island. FIG. 167 provides a chart indicating the number and type of sortase sequences identified within the adhesin islands of various strains and serotypes of GAS. As can be seen in this figure, all GAS strains and serotypes thus far characterized as an AI-1 have a SrtB type sortase, all GAS strains and serotypes thus far characterized as an AI-2 have SrtB and SrtC1 type sortases, all GAS strains and serotypes thus far characterized as an AI-3 have a SrtC2 type sortase, and all GAS strains and serotypes thus far characterized as an AI-4 have SrtB and SrtC2 type sortases. A comparison of the percentage identity of sequences within the adhesin islands was presented in Table 45, see above.

[0816] (1) Adhesin Island Sequence within M6: GAS Adhesin Island 1 (“GAS AI-1”)

[0817] A GAS Adhesin Island within M6 serotype (MGAS10394) is outlined in Table 4 below. This GAS adhesin island 1 (“GAS AI-1”) comprises surface proteins, a srtB sortase and a rofA divergently transcribed transcriptional regulator.

[0818] GAS AI-1 surface proteins include Spy0157 (a fibronectin binding protein), Spy0159 (a collagen adhesion protein) and Spy0160 (a fimbrial structural subunit). Preferably, each of these GAS AI-1 surface proteins includes an LPXTG sortase substrate motif, such as LPXTG (SEQ ID NO: 122) or LPXSG (SEQ ID NO: 134) (conservative replacement of threonine with serine).

[0819] GAS AI-1 includes a srtB type sortase. GAS srtB sortases may preferably anchor surface proteins with an LPSTG motif (SEQ ID NO: 166), particularly where the motif is followed by a serine.

TABLE 4
GAS AI-1 sequences from M6 isolate (MGAS10394)

| | Sortase substrate | |
|---|---|---|
| AI-1 sequence | sequence or sortase | |
| identifier | type | functional description |
| M6_Spy0156 | | Transcriptional regulator (rofA) |
| M6_Spy0157 | LPXTG | Fibronectin-binding protein |
| M6_Spy0158 | | Reverse transcriptase |
| M6_Spy0159 | LPXSG | Collagen adhesion protein |
| M6_Spy0160 | LPXTG | Fimbrial structural subunit |
| M6_Spy0161 | srtB | Sortase |

[0820] M6_Spy0160 appears to be present on the surface of GAS as part of oligomeric (pilus) structures. FIGS. 127-132 present electron micrographs of GAS serotype M6 strain 3650 immunogold stained for M6 Spy0160 using anti-M6 Spy0160 antiserum. Oligomeric or hyperoligmeric structures labelled with gold particles can be seen extending from the surface of the GAS in each of these figures, indicating the presence of multiple M6_Spy0160 polypeptides in the oligomeric or hyperoligomeric structures. FIG. 176 A-F present electron micrographs of GAS M6 strain 2724 immunogold stained for M6_Spy0160 using anti-M6_Spy0160 antiserum (FIGS. 176 A-E) or immunogold stained for M6_Spy0159 using anti-M6_Spy0159 antiserum (FIG. 176 F). Oligomeric or hyperoligomeric structures labelled with gold particles can again be seen extending from the surface of the M6 strain 2724 GAS bacteria immunogold stained for M6_Spy0160. M6_Spy0159 is also detected on the surface of the M6 strain 2724 GAS.

[0821] FACS analysis has confirmed that the GAS AI-1 surface proteins spyM6_{—}0159 and spyM6_{—}0160 are indeed expressed on the surface of GAS. FIG. 73 provides the results of FACS analysis for surface expression of spyM6_{—}0159 on each of GAS serotypes M6 2724, M6 3650, and M6 2894. A shift in fluorescence is observed for each GAS serotype when anti-spyM6_{—}0159 antiserum is present, demonstrating cell surface expression. Table 18, below, quantitatively summarizes the FACS fluorescence values obtained for each GAS serotype in the presence of pre-immune antiserum, anti-spyM6_{—}0159 antiserum, and the difference in fluorescence value between the pre-immune and anti-spyM6_{—}0159 antiserum.

TABLE 18
Summary of FACS values for surface expression of spyM6_0159

| 2724 | | | 3650 | | | 2894 | | |
|---|---|---|---|---|---|---|---|---|
| Pre- | Anti- | | Pre- | Anti- | | Pre- | Anti- | |
| immune | spyM6_0159 | Change | immune | spyM6_0159 | Change | immune | spyM6_0159 | Change |
| 134.84 | 427.48 | 293 | 149.68 | 712.62 | 563 | 193.86 | 597.8 | 404 |

[0822] FIG. 74 provides the results of FACS analysis for surface expression of spyM6_{—}0160 on each of GAS serotypes M6 2724, M6 3650, and M6 2894. In the presence of of anti-spyM6_{—}0160 antiserum, a shift in fluorescence is observed for each GAS serotype, which demonstrates its cell surface expression. Table 19, below, quantitatively summarizes the FACS fluorescence values obtained for each GAS serotype in the presence of pre-immune antiserum, anti-spyM6_{—}0160 antiserum, and the change in fluorescence value between the pre-immune and anti-spyM6_{—}0160 antiserum.

TABLE 19
Summary of FACS values for surface expression of spyM6_0160

| 2724 | | | 3650 | | | 2894 | | |
|---|---|---|---|---|---|---|---|---|
| Pre- | Anti- | | Pre- | Anti- | | Pre- | Anti- | |
| immune | spyM6_0160 | change | immune | spyM6_0160 | change | immune | spyM6_0160 | change |
| 117.12 | 443.24 | 326 | 128.57 | 776.39 | 648 | 125.87 | 621.17 | 495 |

[0823] Surface expression of M6_Spy0159 and M6_Spy0160 on M6 serotype GAS has also been confirmed by Western blot analysis. FIG. 98 shows that while pre-immune sera (P α-0159) does not detect expression of M6_Spy0159 in GAS serotype M6, anti-M6_Spy0159 immune sera (I α-0159) is able to detect M6_Spy0159 protein in both total GAS M6 extracts (M6 tot) and GAS M6 fractions enriched for cell surface proteins (M6 surf prot). The M6_Spy0159 proteins detected in the total GAS M6 extracts or the GAS M6 extracts enriched for surface proteins are also present as high molecular weight structures, indicating that M6_Spy0159 may be in an oligomeric (pilus) form.

[0824] FIG. 112 shows that while preimmune sera (Preimmune Anti 106) does not detect expression of M6_Spy0160 in GAS serotype M6 strain 2724, anti-M6_Spy0160 immune sera (Anti 160) does in both total GAS M6 strain 2724 extracts (M6 2724 tot) and GAS M6 strain 2724 fractions enriched for surface proteins. The M6_Spy0160 proteins detected in the total GAS M6 strain 2724 extracts or the GAS M6 strain 2724 extracts enriched for surface proteins are also present as high molecular weight structures, indicating that M6_Spy0160 may be in an oligomeric (pilus) form.

[0825] FIGS. 110 and 111 both further verify the presence of M6_Spy0159 and M6_Spy0160 in higher molecular weight structures on the surface of GAS. FIG. 110 provides a Western blot performed to detect M6_Spy0159 and M6_Spy0160 in GAS M6 strain 2724 extracts enriched for surface proteins. Antiserum raised against either M6_Spy0159 (Anti-159) or M6_Spy0160 (Anti-160) cross-hybridizes with high molecular weight structures (pili) in these extracts. FIG. 111 provides a similar Western blot that verifies the presence of M6_Spy0159 and M6_Spy0160 in high molecular weight structures in GAS M6 strain 3650 extracts enriched for surface proteins.

[0826] SpyM6_{—}0157 (a fibronectin-binding protein) may also be expressed on the surface of GAS serotype M6 bacteria. FIG. 174 shows the results of FACS analysis for surface expression of spyM6_{—}0157 on M6 strain 3650. A slight shift in fluorescence is observed, which demonstrates that some spyM6_{—}0157 may be expressed on the GAS cell surface.

Adhesin Island Sequence within M6: GAS Adhesin Island 2 (“GAS AI-2”)

[0827] A GAS Adhesin Island within M1 serotype (SF370) is outlined in Table 5 below. This GAS adhesin island 2 (“GAS AI-2”) comprises surface proteins, a SrtB sortase, a SrtC1 sortase and a RofA divergently transcribed transcriptional regulator.

[0828] GAS AI-2 surface proteins include GAS 15 (Cpa), Spy0128 (thought to be a fimbrial protein) and Spy0130 (a hypothetical protein). Preferably, each of these GAS AI-2 surface proteins includes an LPXTG sortase substrate motif, such as LPXTG (SEQ ID NO: 122), VVXTG (SEQ ID NO: 135), or EVXTG (SEQ ID NO: 136).

[0829] GAS AI-2 includes a srtB type sortase and a srtC1 sortase. As discussed above, GAS SrtB sortases may preferably anchor surface proteins with an LPSTG (SEQ ID NO: 166) motif, particularly where the motif is followed by a serine. GAS SrtC1 sortase may preferentially anchor surface proteins with a V(P/V)PTG (SEQ ID NO: 167) motif. GAS SrtC1 may be differentially regulated by RofA.

[0830] GAS AI-2 may also include a LepA putative signal peptidase I protein.

TABLE 5
GAS AI-2 sequence from M1 isolate (SF370)

| | Sortase substrate | |
|---|---|---|
| AI-2 sequence | sequence or | |
| identifier | sortase type | functional description |
| SPy0124 | | rofA regulatory protein |
| GAS15(not | VVXTG | cpa |
| annotated | | |
| in SF370) | | |
| SPy0127 | | LepA putative signal peptidase I |
| SPy0128 (GAS16) | EVXTG | hypothetical protein (fimbrial) |
| SPy0129 (GAS17) | srtC1 | sortase |
| SPy0130 (GAS18) | LPXTG | hypothetical protein |
| SPy0131 | | conserved hypothetical protein |
| SPy0133 | | conserved hypothetical protein |
| SPy0135 (GAS20) | srtB | sortase (putative fimbrial- |
| | | associated protein) |

[0831] GAS 15, GAS 16, and GAS 18 appear to be present on the surface of GAS as part of oligomeric (pilus) structures. FIGS. 113-115 present electron micrographs of GAS serotype M1 strain SF370 immunogold stained for GAS 15 using anti-GAS 15 antiserum. FIGS. 116-121 provide electron micrographs of GAS serotype M1 strain SF370 immunogold stained for GAS 16 using anti-GAS 16 antiserum. FIGS. 122-125 present electron micrograph of GAS serotype M1 strain SF370 immunogold stained for GAS 18 using anti-GAS 18 antiserum. Oligomers of these proteins can be seen on the surface of SF370 bacteria in the immuno-gold stained micrographs.

[0832] FIG. 126 reveals a hyperoligomer on the surface of a GAS serotype M1 strain SF370 bacterium immunogold stained for GAS 18. This long hyperoliogmeric structure comprising GAS 18 stretches far out into the supernatant from the surface of the bacteria.

[0833] FACS analysis has confirmed that the GAS AI-2 surface proteins GAS 15, GAS 16, and GAS 18 are expressed on the surface of GAS. FIG. 75 provides the results of FACS analysis for surface expression of GAS 15 on each of GAS serotypes M1 2719, M1 2580, M1 3280, M1 SF370, M1 2913, and M1 3348. A shift in fluorescence is observed for each GAS serotype when anti-GAS 15 antiserum is present, demonstrating cell surface expression. Table 20, below, quantitatively summarizes the FACS fluorescence values obtained for each GAS serotype in the presence of pre-immune antiserum, anti-GAS 15 antiserum, and the difference in fluorescence value between the pre-immune and anti-GAS 15 antiserum.

TABLE 20
Summary of FACS values for surface expression of GAS 15

| Pre- | Anti-GAS | | Pre- | Anti-GAS | | Pre- | Anti-GAS | |
|---|---|---|---|---|---|---|---|---|
| immune | 15 | Change | immune | 15 | Change | immune | 15 | Change |
| 2719 | | | 2580 | | | 3280 | | |
| 159.46 | 712.71 | 553 | 123.9 | 682.84 | 559 | 217.02 | 639.69 | 423 |
| SF370 | | | 2913 | | | 3348 | | |
| 201.93 | 722.68 | 521 | 121.41 | 600.45 | 479 | 152.09 | 446.41 | 294 |

[0834] FIGS. 76 and 79 provide the results of FACS analysis for surface expression of GAS 16 on each of GAS serotypes M1 2719, M1 2580, M1 3280, M1 SF370, M1 2913, and M1 3348. The FACS data in FIG. 76 was obtained using antisera was raised against full length GAS 16. In the presence of this anti-GAS 16 antiserum, a shift in fluorescence is observed for each GAS serotype, demonstrating its cell surface expression. Table 21, below, quantitatively summarizes the FACS fluorescence values obtained for each GAS serotype in the presence of pre-immune antiserum, anti-GAS 16 antiserum, and the change in fluorescence value between the pre-immune and anti-GAS 16 antiserum.

TABLE 21
Summary of FACS values for surface expression of GAS 16

| Pre- | Anti-GAS | | Pre- | Anti-GAS | | Pre- | Anti-GAS | |
|---|---|---|---|---|---|---|---|---|
| immune | 16 | Change | immune | 16 | Change | immune | 16 | Change |
| 2719 | | | 2580 | | | 3280 | | |
| 233.27 | 690.09 | 457 | 133.82 | 732.29 | 598 | 264.47 | 649.43 | 385 |
| SF370 | | | 2913 | | | 3348 | | |
| 237.2 | 727.46 | 490 | 138.52 | 588.04 | 450 | 180.56 | 420.93 | 240 |

[0835] The FACS data in FIG. 79 was obtained using antisera was raised against a truncated GAS 16, which is encoded by SEQ ID NO: 179, shown below.

SEQ ID NO: 179:

GCTACAACAGTTCACGGGGAGACTGTTGTAAACGGAGCCAAACTAACAGT
TACAAAAAACCTTGATTTAGTTAATAGCAATGCATTAATTCCAAATACAG
ATTTTACATTTAAAATCGAACCTGATACTACTGTCAACGAAGACGGAAAT
AAGTTTAAAGGTGTAGCTTTGAACACACCGATGACTAAAGTCACTTACAC
CAATTCAGATAAAGGTGGATCAAATACGAAAACTGCAGAATTTGATTTTT
CAGAAGTTACTTTTGAAAAACCAGGTGTTTATTATTACAAAGTAACTGAG
GAGAAGATAGATAAAGTTCCTGGTGTTTCTTATGATACAACATCTTACAC
TGTTCAAGTTCATGTCTTGTGGAATGAAGAGCAACAAAAACCAGTAGCTA
CTTATATTGTTGGTTATAAAGAAGGTAGTAAGGTGCCAATTCAGTTCAAA
AATAGCTTAGATTCTACTACATTAACGGTGAAGAAAAAAGTTTCAGGTAC
CGGTGGAGATCGCTCTAAAGATTTTAATTTTGGTCTGACTTTAAAAGCAA
ATCAGTATTATAAGGCGTCAGAAAAAGTCATGATTGAGAAGACAACTAAA
GGTGGTCAAGCTCCTGTTCAAACAGAGGCTAGTATAGATCAACTCTATCA
TTTTACCTTGAAAGATGGTGAATCAATCAAAGTCACAAATCTTCCAGTAG
GTGTGGATTATGTTGTCACTGAAGACGATTACAAATCAGAAAAATATACA
ACCAACGTGGAAGTTAGTCCTCAAGATGGAGCTGTAAAAAATATCGCAGG
TAATTCAACTGAACAAGAGACATCTACTGATAAAGATATGACCATTACTT
TTACAAATAAAAAAGATTT

[0836] In the presence of this anti-GAS 16 antiserum, a shift in fluorescence is observed for each GAS serotype, demonstrating its cell surface expression. Table 22, below, quantitatively summarizes the FACS fluorescence values obtained for each GAS serotype in the presence of pre-immune antiserum, anti-GAS 16 antiserum, and the change in fluorescence value between the pre-immune and anti-GAS 16 antiserum.

TABLE 22
Summary of FACS values for surface expression of GAS 16 using a second antisera

| Pre- | Anti-GAS | | Pre- | Anti-GAS | | Pre- | Anti-GAS | |
|---|---|---|---|---|---|---|---|---|
| immune | 16 | Change | immune | 16 | Change | immune | 16 | Change |
| 2719 | | | 2580 | | | 3280 | | |
| 141.55 | 650.22 | 509 | 119.57 | 672.35 | 553 | 209.18 | 666.71 | 458 |
| SF370 | | | 2913 | | | 3348 | | |
| 159.92 | 719.32 | 559 | 115.97 | 585.9 | 470 | 146.1 | 414.01 | 268 |

[0837] FIGS. 77 and 78 provide the results of FACS analysis for surface expression of GAS 18 on each of GAS serotypes M12719, M12580, M1 3280, M1 SF370, M12913, and M13348. The antiserum used to obtain the FACS data in each of FIGS. 77 and 78 was different, although each was raised against full length GAS 18. In the presence of each of the anti-GAS 18 antisera, a shift in fluorescence is observed for each GAS serotype, demonstrating its cell surface expression. Tables 23 and 24, below, quantitatively summarizes the FACS fluorescence values obtained for each GAS serotype in the presence of pre-immune antiserum, first or second anti-GAS 18 antiserum, and the change in fluorescence value between the pre-immune and first or second anti-GAS 18 antiserum.

TABLE 23
Summary of FACS values for surface expression of GAS 18

| Pre- | Anti-GAS | | Pre- | Anti-GAS | | Pre- | Anti-GAS | |
|---|---|---|---|---|---|---|---|---|
| immune | 18 | Change | immune | 18 | Change | immune | 18 | Change |
| 2719 | | | 2580 | | | 3280 | | |
| 135.68 | 327.98 | 192 | 116.32 | 379.41 | 263 | 208.12 | 380.84 | 173 |
| SF370 | | | 2913 | | | 3348 | | |
| 185.39 | 438.23 | 253 | 119.95 | 373.32 | 253 | 147.12 | 266.51 | 119 |

[0838] TABLE 24
Summary of FACS values for surface expression of GAS 18 using a second antisera

| Pre- | Anti-GAS | | Pre- | Anti-GAS | | Pre- | Anti-GAS | |
|---|---|---|---|---|---|---|---|---|
| immune | 18 | Change | immune | 18 | Change | immune | 18 | Change |
| 2719 | | | 2580 | | | 3280 | | |
| 150.4 | 250.39 | 100 | 139.18 | 386.38 | 247 | 253.38 | 347.72 | 94 |
| SF370 | | | 2913 | | | 3348 | | |
| 188.64 | 373.11 | 184 | 124.94 | 384.82 | 260 | 168.8 | 213.65 | 45 |

[0839] Surface expression of GAS 15, GAS 16, and GAS 18 on M1 serotype GAS has also been confirmed by Western blot analysis. FIG. 89 shows that while pre-immune sera does not detect GAS M1 expression of GAS 15, anti-GAS 15 immune sera is able to detect GAS 15 protein in both total GAS M1 extracts and GAS M1 proteins enriched for cell surface proteins. The GAS 15 proteins detected in the M1 extracts enriched for surface proteins are also present as high molecular weight structures, indicating that GAS 15 may be in an oligomeric (pilus) form. FIG. 90 also shows the results of Western blot analysis of M1 serotype GAS using anti-GAS 15 antisera. Again, the lanes that contain GAS M1 extracts enriched for surface proteins (M1 prot sup) show the presence of high molecular weight structures that may be oligomers of GAS 15. FIG. 91 provides an additional Western blot identical to that of FIG. 90, but that was probed with pre-immune sera. As expected, no proteins were detected on this membrane.

[0840] FIG. 92 provides a Western blot that was probed for GAS 16 protein. While pre-immune sera does not detect GAS M1 expression of GAS 16, anti-GAS 16 immune sera is able to detect GAS 16 protein in GAS M1 extracts enriched for cell surface proteins. The GAS 16 proteins detected in the M1 extracts enriched for surface proteins are present as high molecular weight structures, indicating that GAS 16 may be in an oligomeric (pilus) form. FIG. 93 also shows the results of Western blot analysis of M1 serotype GAS using anti-GAS 16 antisera. The lanes that contain total GAS M1 protein (M1 tot new and M1 tot old) and the lane that contains GAS M1 extracts enriched for surface proteins (M1 prot sup) show the presence of high molecular weight structures that may be oligomers of GAS 16. FIG. 94 provides an additional Western blot identical to that of FIG. 93, but that was probed with pre-immune sera. As expected, no proteins were detected on this membrane.

[0841] FIG. 95 provides a Western blot that was probed for GAS 18 protein. While pre-immune sera does not detect GAS M1 expression of GAS 18, anti-GAS 18 immune sera is able to detect GAS 18 protein in GAS M1 extracts enriched for cell surface proteins. The GAS 18 proteins detected in the M1 extracts enriched for surface proteins are present as high molecular weight structures, indicating that GAS 18 may be in an oligomeric (pilus) form. FIG. 96 also shows the results of Western blot analysis of M1 serotype GAS using anti-GAS 18 antisera. The lane that contains GAS M1 extracts enriched for surface proteins (M1 prot sup) show the presence of high molecular weight structures that may be oligomers of GAS 18. FIG. 97 provides an additional Western blot identical to that of FIG. 96, but that was probed with pre-immune sera. As expected, no proteins were detected on this membrane.

[0842] FIGS. 102-106 provide additional Western blots to verify the presence of GAS 15, GAS 16, and GAS 18 in high molecular weight structures in GAS. Each Western blot was performed using proteins from a different GAS M1 strain, 2580, 2913, 3280, 3348, and 2719. Each Western blot was probed with antisera raised against each of GAS 15, GAS 16, and GAS 18. As can be seen in FIGS. 102-106, none of the Western blots shows detection of proteins using pre-immune serum (Pα-158, Pα-15, Pα-16, or Pα-18), while each Western blot shows cross-hybridization of the GAS 15 (1α-15), GAS 16 (1α-16), and GAS 18 (1α-18) antisera to high molecular weight structures. Thus, these Western blots confirm that GAS 15, GAS 16, and GAS 18 can be present in pili in GAS M1.

[0843] FIG. 107 provides a similar Western blot performed to detect GAS 15, GAS 16, and GAS 18 proteins in a GAS serotype M1 strain SF370 protein fraction enriched for surface proteins. This Western blot also shows detection of GAS 15 (Anti-15), GAS 16 (Anti-16), and GAS 18 (Anti-18) as high molecular weight structures.

[0844] (3) Adhesin Island Sequence within M3, M5 and M18: GAS Adhesin Island 3 (“GAS AI-3”)

[0845] GAS Adhesin Island sequences within M3, M5, and M18 serotypes are outlined in Tables 6-8 and 10 below. This GAS adhesin island 3 (“GAS AI-3”) comprises surface proteins, a SrtC2 sortase, and a Negative transcriptional regulator (Nra) divergently transcribed transcriptional regulator.

[0846] GAS AI-3 surface proteins within include a collagen binding protein, a fimbrial protein, a F2 like fibronectin-binding protein. GAS AI-3 surface proteins may also include a hypothetical surface protein. Preferably, each of these GAS AI-3 surface proteins include an LPXTG sortase substrate motif, such as LPXTG (SEQ ID NO: 122), VPXTG (SEQ ID NO: 137), QVXTG (SEQ ID NO: 138) or LPXAG (SEQ ID NO: 139).

[0847] GAS AI-3 includes a SrtC2 type sortase. GAS SrtC2 type sortases may preferably anchor surface proteins with a QVPTG (SEQ ID NO: 140) motif, particularly when the motif is followed by a hydrophobic region and a charged C terminus tail. GAS SrtC2 may be differentially regulated by Nra.

[0848] GAS AI-3 may also include a LepA putative signal peptidase I protein.

[0849] GAS AI-3 may also include a putative multiple sugar metabolism regulator.

TABLE 6
GAS AI-3 sequences from M3 isolate (MGAS315)

| | Sortase | |
|---|---|---|
| | substrate | |
| AI-3 sequence | sequence or | |
| identifier | sortase type | Functional description |
| SpyM3_0097 | | Negative transcriptional regulator (Nra) |
| SpyM3_0098 | VPXTG | putative collagen binding protein (Cpb) |
| SpyM3_0099 | | LepA putative signal peptidase I |
| SpyM3_0100 | QVXTG | conserved hypothetical protein (fimbrial) |
| SpyM3_0101 | SrtC2 | sortase |
| SpyM3_0102 | LPXAG | hypothetical protein |
| SpyM3_0103 | | putative multiple sugar metabolism |
| | | regulator |
| SpyM3_0104 | LPXTG | protein F2 like fibronectin-binding protein |

[0850] TABLE 7
GAS AI-3 sequence from M3 isolate (SSI-1)

| | Sortase | |
|---|---|---|
| | Substrate | |
| AI-3 sequence | sequence or | |
| identifier | sortase type | Functional description |
| SPs0099 | | Negative transcriptional regulator (Nra) |
| SPs0100 | VPXTG | putative collagen binding protein (Cpb) |
| SPs0101 | | LepA putative signal peptidase I |
| SPs0102 | QVXTG | conserved hypothetical protein (fimbrial) |
| SPs0103 | SrtC2 | sortase |
| SPs0104 | LPXAG | hypothetical protein |
| SPs0105 | | putative multiple sugar metabolism |
| | | regulator |
| SPs0106 | LPXTG | protein F2 like fibronectin-binding protein |

[0851] TABLE 10
GAS AI-3 sequences from M5 isolate (Manfredo)

| AI-3 | Sortase substrate | |
|---|---|---|
| sequence | sequence or | |
| identifier | sortase type | Functional description |
| orf77 | | Negative transcriptional regulator (Nra) |
| orf78 | VPXTG | putative collagen binding protein (Cpb) |
| orf79 | | LepA putative signal peptidase I |
| orf80 | QVXTG | conserved hypothetical protein (fimbrial) |
| orf81 | SrtC2 | sortase |
| orf82 | LPXAG | hypothetical protein |
| orf83 | | putative multiple sugar metabolism |
| | | regulator |
| orf84 | LPXTG | protein F2 like fibronectin-binding protein |

[0852] TABLE 8
GAS AI-3 sequences from M18 isolate (MGAS8232)

| | Sortase | |
|---|---|---|
| | substrate | |
| AI-3 sequence | sequence or | |
| identifier | sortase type | Functional description |
| spyM18_0125 | | Negative transcriptional regulator (Nra) |
| | | (N-terminal fragment) |
| spyM18_0126 | VPXTG | putative collagen binding protein (Cpb) |
| spyM18_0127 | | LepA putative signal peptidase I |
| spyM18_0128 | QVXTG | conserved hypothetical protein (fimbrial) |
| spyM18_0129 | SrtC2 | sortase |
| spyM18_0130 | LPXAG | hypothetical protein |
| spyM18_0131 | | putative multiple sugar metabolism |
| | | regulator |
| spyM18_0132 | LPXTG | protein F2 like fibronectin-binding protein |

[0853] TABLE 44
GAS AI-3 sequences from M49 isolate (591)

| | Sortase substrate | |
|---|---|---|
| AI-3 sequence | sequence or | |
| identifier | sortase type | Functional description |
| SpyoM01000156 | | Negative transcriptional regulator |
| | | (Nra) |
| SpyoM01000155 | VPXTG | collagen binding protein (Cpa) |
| SpyoM01000154 | | LepA putative signal peptidase I |
| SpyoM01000153 | QVXTG | conserved hypothetical protein |
| | | (fimbrial) |
| SpyoM01000152 | SrtC2 | sortase |
| SpyoM01000151 | LPXAG | hypothetical protein |
| SpyoM01000150 | | MsmRL |
| SpyoM01000149 | LPXTG | protein F2 like fibronectin- |
| | | binding protein |

[0854] A schematic of AI-3 serotypes M3, M5, M 18, and M49 is shown in FIG. 51A. Each contains an open reading frame encoding a SrtC2-type sortase of nearly identical amino acid sequence. See FIG. 52B for an amino acid sequence alignment for each of the SrtC2 amino acid sequences.

[0855] The protein F2-like fibronectin-binding protein of each these type 3 adhesin islands contains a pilin motif and an E-box. FIG. 60 indicates the amino acid sequence of the pilin motif and E-box of each of GAS AI-3 serotype M3 MGAS315 (SpyM3_{—}0104/21909640), GAS AI-3 serotype M3 SSI (Sps0106/28895018), GAS AI-3 serotype M18 (SpyM18_{—}0132/19745307), and GASAI-3 serotype M5 (orf84).

[0856] FACS analysis has confirmed that the GAS AI-3 surface proteins SpyM3_{—}0098, SpyM3_{—}0100, SpyM3_{—}0102, and SpyM3_{—}0104 are expressed on the surface of GAS. FIG. 80 provides the results of FACS analysis for surface expression of SpyM3_{—}0098 on each of GAS serotypes M3 2721 and M3 3135. A shift in fluorescence is observed for each GAS serotype when anti-SpyM3_{—}0098 antiserum is present, demonstrating cell surface expression. Table 25, below, quantitatively summarizes the FACS fluorescence values obtained for each GAS serotype in the presence of pre-immune antiserum, anti-SpyM3_{—}0098 antiserum, and the difference in fluorescence value between the pre-immune and anti-SpyM3_{—}0098 antiserum.

TABLE 25
Summary of FACS values for surface expression of SpyM3_0098

| 2721 | | | 3135 | | |
|---|---|---|---|---|---|
| Pre- | Anti- | | Pre- | Anti- | |
| immune | spyM3_0098 | Change | immune | spyM3_0098 | Change |
| 117.85 | 249.51 | 132 | 99.17 | 277.21 | 178 |

[0857] FIG. 81 provides the results of FACS analysis for surface expression of SpyM3_{—}0100 on each of GAS serotypes M3 2721 and M3 3135. A shift in fluorescence is observed for each GAS serotype when anti-SpyM3_{—}0100 antiserum is present, demonstrating cell surface expression. Table 26, below, quantitatively summarizes the FACS fluorescence values obtained for each GAS serotype in the presence of pre-immune antiserum, anti-SpyM3_{—}0100 antiserum, and the difference in fluorescence value between the pre-immune and anti-SpyM3_{—}0100 antiserum.

TABLE 26
Summary of FACS values for surface expression of SpyM3_0100

| 2721 | | | 3135 | | |
|---|---|---|---|---|---|
| Pre- | Anti- | | Pre- | Anti- | |
| immune | spyM3_0100 | Change | immune | spyM3_0100 | Change |
| 110.31 | 181.91 | 72 | 97.87 | 250.01 | 152 |

[0858] FIG. 82 provides the results of FACS analysis for surface expression of SpyM3_{—}0102 on each of GAS serotypes M3 2721 and M3 3135. A shift in fluorescence is observed for each GAS serotype when anti-SpyM3_{—}0102 antiserum is present, demonstrating cell surface expression. Table 27, below, quantitatively summarizes the FACS fluorescence values obtained for each GAS serotype in the presence of pre-immune antiserum, anti-SpyM3_{—}0102 antiserum, and the difference in fluorescence value between the pre-immune and anti-SpyM3_{—}0102 antiserum.

TABLE 27
Summary of FACS values for surface expression
of SpyM3_0102 in M3 serotypes

| 2721 | | | 3135 | | |
|---|---|---|---|---|---|
| Pre- | Anti- | | Pre- | Anti- | |
| immune | spyM3_0102 | Change | immune | spyM3_0102 | Change |
| 109.86 | 155.26 | 45 | 100.02 | 112.58 | 13 |

[0859] FIG. 82 also provides the results of FACS analysis for surface expression of a pilin antigen that has homology to SpyM3_{—}0102 identified in a different GAS serotype, M6. FACS analysis conducted with the SpyM3_{—}0102 antisera was able to detect surface expression of the homologous SpyM3_{—}0102 antigen on each of GAS serotypes M6 2724, M6 3650, and M6 2894. Table 28, below, quantitatively summarizes the FACS fluorescence values obtained for each GAS serotype in the presence of pre-immune antiserum, anti-SpyM3_{—}0102 antiserum, and the difference in fluorescence value between the pre-immune and anti-SpyM3_{—}0102 antiserum.

TABLE 28
Summary of FACS values for surface expression of SpyM3_0102 in M6 serotypes

| 2724 | | | 3650 | | | 2894 | | |
|---|---|---|---|---|---|---|---|---|
| Pre- | Anti- | | Pre- | Anti- | | Pre- | Anti- | |
| immune | spyM3_0102 | Change | immune | spyM3_0102 | Change | immune | spyM3_0102 | Change |
| 146.59 | 254.03 | 107 | 162.56 | 294.03 | 131 | 175.49 | 313.69 | 138 |

[0860] SpyM3_{—}0102 is also homologous to pilin antigen 19224139 of GAS serotype M12. Antisera raised against SpyM3_{—}0102 is able to detect high molecular weight structures in GAS serotype M12 strain 2728 protein fractions enriched for surface proteins, which would contain the 19224139 antigen. See FIG. 109 at the lane labelled M112 2728 surf prot.

[0861] FIG. 83 provides the results of FACS analysis for surface expression of SpyM3_{—}0104 on each of GAS serotypes M3 2721 and M3 3135. A shift in fluorescence is observed for each GAS serotype when anti-SpyM3_{—}0104 antiserum is present, demonstrating cell surface expression. Table 29, below, quantitatively summarizes the FACS fluorescence values obtained for each GAS serotype in the presence of pre-immune antiserum, anti-SpyM3_{—}0104 antiserum, and the difference in fluorescence value between the pre-immune and anti-SpyM3_{—}0104 antiserum.

TABLE 29
Summary of FACS values for surface expression of
SpyM3_0104 in M3 serotypes

| 2721 | | | 3135 | | |
|---|---|---|---|---|---|
| Pre- | Anti- | | Pre- | Anti- | |
| immune | spyM3_0104 | Change | immune | spyM3_0104 | Change |
| 128.45 | 351.65 | 223 | 105.1 | 339.88 | 235 |

[0862] FIG. 83 also provides the results of FACS analysis for surface expression of a pilin antigen that has homology to SpyM3_{—}0104 identified in a different GAS serotype, M12. FACS analysis conducted with the SpyM3_{—}0104 antisera was able to detect surface expression of the homologous SpyM3_{—}0104 antigen on GAS serotype M12 2728. Table 30, below, quantitatively summarizes the FACS fluorescence values obtained for this GAS serotype in the presence of pre-immune antiserum, anti-SpyM3_{—}0104 antiserum, and the difference in fluorescence value between the pre-immune and anti-SpyM3_{—}0104 antiserum.

TABLE 30
Summary of FACS values for surface expression of SpyM3_0104
in an M12 serotype
2728

| Pre-immune | Anti-spyM3_0104 | Change |
|---|---|---|
| 198.57 | 288.75 | 90 |

[0863] FIG. 84 provides the results of FACS analysis for surface expression of SPs_{—}0106 on each of GAS serotypes M3 2721 and M3 3135. A shift in fluorescence is observed for each GAS serotype when anti-SPs_{—}0106 antiserum is present, demonstrating cell surface expression. Table 31, below, quantitatively summarizes the FACS fluorescence values obtained for each GAS serotype in the presence of pre-immune antiserum, anti-SPs_{—}0106 antiserum, and the difference in fluorescence value between the pre-immune and anti-SPs_{—}0106 antiserum.

TABLE 31
Summary of FACS values for surface expression
of SPs_0106 in M3 serotypes

| 2721 | | | 3135 | | |
|---|---|---|---|---|---|
| | Anti- | | | Anti- | |
| Pre-immune | SPs_0106 | Change | Pre-immune | SPs_0106 | Change |
| 116 | 463.28 | 347 | 103.02 | 494.27 | 391 |

[0864] FIG. 84 also provides the results of FACS analysis for surface expression of a pilin antigen that has homology to SPs_{—}0106 identified in a different GAS serotype, M12. FACS analysis conducted with the SPs_{—}0106 antisera was able to detect surface expression of the homologous SPs_{—}0106 antigen on GAS serotype M12 2728. Table 32, below, quantitatively summarizes the FACS fluorescence values obtained for each GAS serotype in the presence of pre-immune antiserum, anti-SPs_{—}0106 antiserum, and the difference in fluorescence value between the pre-immune and anti-SPs_{—}0106 antiserum.

TABLE 32
Summary of FACS values for surface expression of SPs_0106
in an M12 serotype
2728

| Pre-immune | Anti-SPs_0106 | Change |
|---|---|---|
| 304.01 | 254.64 | −49 |

[0865] (4) Adhesin Island Sequence within M12: GAS Adhesin Island 4 (“GAS AI-4”)

[0866] GAS Adhesin Island sequences within M12 serotype are outlined in Table 11 below. This GAS adhesin island 4 (“GAS AI-4”) comprises surface proteins, a SrtC2 sortase, and a RofA regulatory protein.

[0867] GAS AI-4 surface proteins within may include a fimbrial protein, an F or F2 like fibronectin-binding protein, and a capsular polysaccharide adhesion protein (Cpa). GAS AI-4 surface proteins may also include a hypothetical surface protein in an open reading frame (orf). Preferably, each of the GAS AI-4 surface proteins include an LPXTG sortase substrate motif, such as LPXTG (SEQ ID NO: 122), VPXTG (SEQ ID NO: 137), QVXTG (SEQ ID NO: 138) or LPXAG (SEQ ID NO: 139).

[0868] GAS AI-4 includes a SrtC2 type sortase. GAS SrtC2 type sortases may preferably anchor surface proteins with a QVPTG (SEQ ID NO: 140) motif, particularly when the motif is followed by a hydrophobic region and a charged C terminus tail.

[0869] GAS AI-4 may also include a LepA putative signal peptidase I protein and a MsmRL protein.

TABLE 11
GAS AI-4 sequences from M12 isolate (A735)

| | Sortase substrate | |
|---|---|---|
| AI-4 sequence | sequence or sortase | |
| identifier | type | Functional description |
| 19224133 | | RofA regulatory protein |
| 19224134 | LPXTG | protein F |
| | SrtB | SrtB (stop codon*) |
| 19224135 | VPXTG | Cpa |
| 19224136 | | LepA |
| 19224137 | QVXTG | EftLSL.A (fimbrial) |
| 19224138 | SrtC2 | EftLSL.B |
| 19224139 | LPXAG | Orf2 |
| 19224140 | | MsmRL |
| 19224141 | LPXTG | protein F2 |

[0870] A schematic of AI-4 serotype M12 is shown in FIG. 51A.

[0871] One of the open reading frames encodes a SrtC2-type sortase having an amino acid sequence nearly identical to the amino acid sequence of the SrtC2-type sortase of the AI-3 serotypes described above. See FIG. 52B for an amino acid sequence alignment for each of the SrtC2 amino acid sequences.

[0872] Other proteins encoded by the open reading frames of the AI-4 serotype M12 are homologous to proteins encoded by other known adhesin islands in S. pyogenes, as well as the GAS AI-3 serotype M5 (Manfredo). FIG. 52 is an amino acid alignment of the capsular polysaccharide adhesion protein (cpa) of AI-4 serotype M112 (19224135), GAS AI-3 serotype M5 (ORF78), S. pyogenes strain MGAS315 serotype M3 (21909634), S. pyogenes SSI-1 serotype M3 (28810257), S. pyogenes MGAS8232 serotype M3 (19745301), and GAS AI-2 serotype M1 (GAS15). The amino acid sequence of the AI-4 serotype M12 cpa shares a high degree of homology with other cpa proteins.

[0873] FIG. 53 shows that the F-like fibronectin-binding protein encoded by the AI-4 serotype M12 open frame (19224134) shares homology with a F-like fibronectin-binding protein found in S. pyogenes strain MGAS10394 serotype M6 (50913503).

[0874] FIG. 54 is an amino acid sequence alignment that illustrates that the F2-like fibronectin-binding protein of AI-4 serotype M12 (19224141) shares homology with the F2-like fibronectin-binding protein of S. pyogenes strain MGAS8232 serotype M3 (19745307), GAS AI-3 serotype M5 (ORF84), S. pyogenes strain SSI serotype M3 (28810263), and S. pyogenes strain MGAS315 serotype M3 (21909640).

[0875] FIG. 55 is an amino acid sequence alignment that illustrates that the fimbrial protein of AI-4 serotype M12 (19224137) shares homology with the fimbrial protein of GAS AI-3 serotype M5 (ORF80), and the hypothetical protein of S. pyogenes strain MGAS315 serotype M3 (21909636), S. pyogenes strain SSI serotype M3 (28810259), S. pyogenes strain MGAS8732 serotype M3 (19745303), and S. pyogenes strain M1 GAS serotype M1 (13621428).

[0876] FIG. 56 is an amino acid sequence alignment that illustrates that the hypothetical protein of GAS AI-4 serotype M12 (19224139) shares homology with the hypothetical protein of S. pyogenes strain MGAS315 serotype M3 (21909638), S. pyogenes strain SSI-1 serotype M3 (28810261), GAS AI-3 serotype M5 (ORF82), and S. pyogenes strain MGAS8232 serotype M3 (19745305).

[0877] The protein F2-like fibronectin-binding protein of the type 4 adhesin island also contains a highly conserved pilin motif and an E-box. FIG. 60 indicates the amino acid sequence of the pilin motif and E-box in AI-4 serotype M12.

[0878] FACS analysis has confirmed that the GAS AI-4 surface proteins 19224134, 19224135, 19224137, and 19224141 are expressed on the surface of GAS. FIG. 85 provides the results of FACS analysis for surface expression of 19224134 on GAS serotype M12 2728. A shift in fluorescence is observed when anti-19224134 antiserum is present, demonstrating cell surface expression. Table 33, below, quantitatively summarizes the FACS fluorescence values obtained for GAS serotype M12 2728 in the presence of pre-immune antiserum, anti-19224134 antiserum, and the difference in fluorescence value between the pre-immune and anti-19224134 antiserum.

TABLE 33
Summary of FACS values for surface expression of 19224134 in an
M12 serotype
2728

| Pre-immune | Anti-19224134 | Change |
|---|---|---|
| 137.8 | 485.32 | 348 |

[0879] FIG. 85 also provides the results of FACS analysis for surface expression of a pilin antigen that has homology to 19224134 identified in a different GAS serotype, M6. FACS analysis conducted with the 19224134 antisera was able to detect surface expression of the homologous 19224134 antigen on each of GAS serotypes M6 2724, M6 3650, and M6 2894. Table 34, below, quantitatively summarizes the FACS fluorescence values obtained for each GAS serotype in the presence of pre-immune antiserum, anti-19224134 antiserum, and the difference in fluorescence value between the pre-immune and anti-19224134 antiserum.

TABLE 34
Summary of FACS values for surface expression of 19224134 in M6 serotypes

| 2724 | | | 3650 | | | 2894 | | |
|---|---|---|---|---|---|---|---|---|
| Pre- | Anti- | | Pre- | Anti- | | Pre- | Anti- | |
| immune | 19224134 | Change | immune | 19224134 | Change | immune | 19224134 | Change |
| 123.58 | 264.59 | 141 | 140.82 | 262.64 | 122 | 135.4 | 307.25 | 172 |

[0880] FIG. 86 provides the results of FACS analysis for surface expression of 19224135 on GAS serotype M12 2728. A shift in fluorescence is observed when anti-19224135 antiserum is present, demonstrating cell surface expression. Table 35, below, quantitatively summarizes the FACS fluorescence values obtained for GAS serotype M12 2728 in the presence of pre-immune antiserum, anti-19224135 antiserum, and the difference in fluorescence value between the pre-immune and anti-19224135 antiserum.

TABLE 35
Summary of FACS values for surface expression of 19224135
in an M12 serotype
2728

| Pre-immune | Anti-19224135 | Change |
|---|---|---|
| 151.38 | 471.95 | 321 |

[0881] FIG. 87 provides the results of FACS analysis for surface expression of 19224137 on GAS serotype M12 2728. A shift in fluorescence is observed when anti-19224137 antiserum is present, demonstrating cell surface expression. Table 36, below, quantitatively summarizes the FACS fluorescence values obtained for GAS serotype M12 2728 in the presence of pre-immune antiserum, anti-19224137 antiserum, and the difference in fluorescence value between the pre-immune and anti-19224137 antiserum.

TABLE 36
Summary of FACS values for surface expression of 19224137
in an M12 serotype
2728

| Pre-immune | Anti-19224137 | Change |
|---|---|---|
| 140.44 | 433.25 | 293 |

[0882] FIG. 88 provides the results of FACS analysis for surface expression of 19224141 on GAS serotype M12 2728. A shift in fluorescence is observed when anti-19224141 antiserum is present, demonstrating cell surface expression. Table 37, below, quantitatively summarizes the FACS fluorescence values obtained for GAS serotype M12 2728 in the presence of pre-immune antiserum, anti-19224141 antiserum, and the difference in fluorescence value between the pre-immune and anti-19224141 antiserum.

TABLE 37
Summary of FACS values for surface expression of 19224141
in an M12 serotype
2728

| Pre-immune | Anti-19224141 | Change |
|---|---|---|
| 147.02 | 498 | 351 |

[0883] 19224139 (designated as orf2) may also be expressed on the surface of GAS serotype M12 bacteria. FIG. 175 shows the results of FACS analysis for surface expression of 19224139 on M12 strain 2728. A slight shift in fluorescence is observed, which demonstrates that some 19224139 may be expressed on the GAS cell surface.

[0884] Surface expression of 19224135 on M12 serotype GAS has also been confirmed by Western blot analysis. FIG. 99 shows that while pre-immune sera (P α-4135) does not detect GAS M12 expression of 19224135, anti-19224135 immune sera (I α-4135) is able to detect 19224135 protein in both total GAS M12 extracts (M12 tot) and GAS M12 fractions enriched for cell surface proteins (M12 surf prot). The 19224135 proteins detected in the total GAS M12 extracts or the GAS M12 extracts enriched for surface proteins are also present as high molecular weight structures, indicating that 19224135 may be in an oligomeric (pilus) form. See also FIG. 108, which provides a further Western blot showing that anti-19224135 antiserum (Anti-19224135) immunoreacts with high molecular weight structures in GAS M12 strain 2728 protein extracts enriched for surface proteins.

[0885] Surface expression of 19224137 on M12 serotype GAS has also been confirmed by Western blot analysis. FIG. 100 shows that while pre-immune sera (P α-4137) does not detect GAS M12 expression of 19224137, anti-19224137 immune sera (I α-4137) is able to detect 19224137 protein in both total GAS M12 extracts (M12 tot) and GAS M12 fractions enriched for cell surface proteins (M12 surf prot). The 19224137 proteins detected in the total GAS M12 extracts or the GAS M12 extracts enriched for surface proteins are also present as high molecular weight structures, indicating that 19224137 may be in an oligomeric (pilus) form. See also FIG. 108, which provides a further Western blot showing that anti-19224137 antiserum (Anti-19224137) immunoreacts with high molecular weight structures in GAS M12 strain 2728 protein extracts enriched for surface proteins.

Streptococcus pneumoniae

[0886] Adhesin island sequences can be identified in Streptococcus pneumoniae genomes. Several of these genomes include the publicly available Streptococcus pneumoniae TIGR4 genome or Streptococcus pneumoniae strain 670 genome. Examples of these S. pneumoniae AI sequence are discussed below.

[0887] S. pneumoniae Adhesin Islands generally include a series of open reading frames within a S. pneumoniae genome that encode for a collection of surface proteins and sortases. A S. pneumoniae Adhesin Island may encode for amino acid sequences comprising at least one surface protein. Alternatively, an S. pneumoniae Adhesin Island may encode for at least two surface proteins and at least one sortase. Preferably, a S. pneumoniae Adhesin Island encodes for at least three surface proteins and at least two sortases. One or more of the surface proteins may include an LPXTG motif (such as LPXTG (SEQ ID NO: 122)) or other sortase substrate motif. One or more S. pneumoniae AI surface proteins may participate in the formation of a pilus structure on the surface of the S. pneumoniae bacteria.

[0888] S. pneumoniae Adhesin Islands of the invention preferably include a divergently transcribed transcriptional regulator. The transcriptional regulator may regulate the expression of the S. pneumoniae AI operon.

[0889] The S. pneumoniae AI surface proteins may bind or otherwise adhere to fibrinogen, fibronectin, or collagen.

[0890] A schematic of the organization of a S. pneumoniae AI locus is provided in FIG. 137. The locus comprises open reading frames encoding a transcriptional regulator (rlrA), cell wall surface proteins (rrgA, rrgB, rrgc), and sortases (srtB, srtC, srtD). FIG. 137 also indicates the S. pneumoniae strain TIGR4 gene name corresponding to each of these open reading reading frames.

[0891] Tables 9 and 38 identify the genomic location of each of these open reading frames in S. pneumoniae strains TIGR4 and 670, respectively.

TABLE 9
S. pneumoniae AI sequences from TIGR4

| | | | | Synonym (AI | |
|---|---|---|---|---|---|
| Genomic Location | Strand | Length | PID | Sequence Identifier) | Functional description |
| 436302 . . . 437831 | − | 509 | 15900377 | SP0461 | transcriptional regulator |
| 438326 . . . 441007 | + | 893 | 15900378 | SP0462 | cell wall surface anchor family protein |
| 441231 . . . 443228 | + | 665 | 15900379 | SP0463 | cell wall surface anchor family protein |
| 443275 . . . 444456 | + | 393 | 15900380 | SP0464 | cell wall surface anchor family protein |
| 444675 . . . 444806 | − | 43 | 15900381 | SP0465 | hypothetical protein |
| 444857 . . . 445696 | + | 279 | 15900382 | SP0466 | sortase |
| 445791 . . . 446576 | + | 261 | 15900383 | SP0467 | sortase |
| 446563 . . . 447414 | + | 283 | 15900384 | SP0468 | sortase |

[0892] TABLE 38
S. pneumoniae strain 670 AI sequences

| | | AI Sequence | |
|---|---|---|---|
| Genomic Location | Strand | Identifier\ | Functional description |
| 4383-5645 | − | Orf1_670 | IS1167, transposase |
| 5910-7439 | − | Orf2_670 | transcriptional regulator, |
| | | | putative |
| 7934-10606 | + | Orf3_670 | cell wall surface anchor |
| | | | family protein |
| 10839-12773 | + | Orf4_670 | cell wall surface anchor |
| | | | family protein |
| 12796-14001 | + | Orf5_670 | cell wall surface anchor |
| | | | family protein |
| 14327-15241 | + | Orf6_670 | sortase, putative |
| 15336-16121 | + | Orf7_670 | sortase, putative |
| 16108-16959 | + | Orf8_670 | sortase, putative |

[0893] The full-length nucleotide sequence of the S. pneumoniae strain 670 μl is also shown in FIG. 101, as is its translated amino acid sequence.

[0894] At least eight other S. pneumoniae strains contain an adhesin island locus described by the locus depicted in FIG. 137. These strains were identified by an amplification analysis. The genomes of different S. pneumoniae strains were amplified with eleven separate sets of primers. The sequence of each of these primers is provided below in Table 41.

TABLE 41

Sequences of primers used to amplify AI locus

| | | |
|---|---|---|
| Primer | | |
| Pair | Forward Primer Sequence | Reverse Primer Sequence |

| | | |
|---|---|---|
| 1 | ACTTTCTAATGAGTTGTTTAGGCG | AGCGACAAGCCACTGTATCATATT |
| 2 | CTGGTCGATAACTCCTTCAATCTT | GTACGACAAAAGTGTGGCTTGTT |
| 3 | GAATGCGATATTCAGGACCAACTA | ATCTCACTGAGTTAATCCGTTCAC |
| 4 | TGTATACAAGTGTGTCATTGCCAG | CATCTTCACCTGTTCTCACATTTT |
| 5 | GCGGTCTTTAGTCTTCAAAAACA | CAAGAGAAAAACACAGAGCCATAA |
| 6 | TTGCTTAAGTAAGAGAGAAAGGAGC | CAGGAGTATAGTGTCCGCTTTCTT |
| 7 | GGCAATGTTGACTTTATGAAGGTG | TATCAGCATCCCTTTATCTTCAAAC |
| 8 | TGAGATTTTCTCGTTTCTCTTAGC | AATAGACGATGGGTATTGATCATGT |
| 9 | CCGACGAACTTTGATGATTTATTG | ACCAACAGACGATGACTGTTAATC |
| 10 | AATGACTTTGAGCCTGTCTTGAT | TTCTACAATTTCCTGGCCATTATC |
| 11 | GCCATTTGGATCAGCTAAAAGTT | TTTTTCAACCCACTACAGTTGACA |

These primers hybridized along the entire length of the AI locus to generate amplification products representative of sequences throughout the locus. See FIG. 138, which is a schematic of the location where each of these primers hybridizes to the S. pneumoniae AI locus. FIG. 139A provides the set of amplicons obtained from amplification of the AI locus in S. pneumoniae strain TIGR4. FIG. 139B provides the length, in base pairs, of each amplicon in S. pneumoniae strain TIGR4. Amplification of the genome of S. pneumoniae strains 19A Hungary 6, 6B Finland 12, 6B Spain 2, 9V Spain 3, 14 CSR 10, 19F Taiwan 14, 23F Taiwan 15, and 23F Poland 16 produced a set of eleven amplicons for the eleven primer pairs, indicating that each of these strains also contained the S. pneumoniae AI locus.

[0895] The S. pneumoniae strains were also identified as containing the AI locus by comparative genome hybridization (CGH) analysis. The genomes of sixteen S. pneumoniae strains were interrogated for the presence of the AI locus by comparison to unique open reading frames of strain TIGR4. The AI locus was detected by this method in strains 19A Hungary 6 (19AHUN), 6B Finland 12 (6BFIN12), 6B Spain 2 (6BSP2), 14CSR10 (14 CSR10), 9V Spain 3 (9VSP3), 19F Taiwan 14 (19FTW14), 23F Taiwan 15 (19FTW15), and 23F Poland 16 (23FP16). See FIG. 140.

[0896] The AI locus has been sequenced for each of these strains and the nucleotide and encoded amino acid seqeunce for each orf has been determined. An alignment of the complete nucleotide sequence of the adhesin island present in each of the ten strains is provided in FIG. 196. Aligning the amino acid sequences encoded by the orfs reveals conservation of many of the AI polypeptide amino acid sequences. For example, Table 39 provides a comparison of the percent identities of the polypeptides encoded within the S. pneumoniae strain 670 and TIGR4 adhesin islands.

TABLE 39
Pecent identity comparison of S. pneumoniae strains AI sequences

| S. pneumoniae | S. pneumoniae | |
|---|---|---|
| strain 670 | from TIGR4 | |
| polypeptide | polypeptide | Shared identity of polypeptides |
| Orf1_670 | SP0460 | 99.3% identity in 422 aa overlap |
| Orf2_670 | SP0461 | 100.0% identity in 509 aa overlap |
| Orf3_670 | SP0462 | 83.2% identity in 895 aa overlap |
| Orf4_670 | SP0463 | 47.9% identity in 678 aa overlap |
| Orf5_670 | SP0464 | 99.7% identity in 393 aa overlap |
| Orf6_670 | SP0466 | 100.0% identity in 279 aa overlap |
| Orf7_670 | SP0467 | 94.2% identity in 260 aa overlap |
| Orf8_670 | SP0468 | 91.5% identity in 283 aa overlap |

FIGS. 141-147 each provide a multiple sequence alignment for the polypeptides encoded by one of the open reading frames in all ten AI-positive S. pneumoniae strains. In each of the sequence alignments, light shading indicates an LPXTG motif and dark shading indicates the presence of an E-box motif with the conserved glutamic acid residue of the E-box motif in bold.

[0897] The sequence alignments also revealed that the polypeptides encoded by most of the open reading frames may be divided into two groups of homology, S. pneumoniae AI-a and AI-b. S. pneumoniae strains that comprise AI-a include 14 CSR 10, 19A Hungary 6, 23F Poland 15, 670, 6B Finland 12, and 6B Spain 2. S. pneumoniae strains that comprise AI-b include 19F Taiwan 14, 9V Spain 3, 23F Taiwan 15, and TIGR4. An immunogenic composition of the invention may comprise one or more polypeptides from within each of S. pneumoniae AI-a and AI-b. For example, polypeptide RrgB, encoded by open reading frame 4, may be divided within two such groups of homology. One group contains the RrgB sequences of six S. pneumoniae strains and a second group contains the RrgB sequences of four S. pneumoniae strains. While the amino acid sequence of the strains within each individual group is 99-100 percent identical, the amino acid sequence identity of the strains in the first relative to the second group is only 48%. Table 41 provides the identity comparisons of the amino acid sequences encoded by each open reading frame for the ten S. pneumoniae strains.

TABLE 42
Conservation of amino acid sequences encoded
by the S. pneumoniae AI locus

| | | | % Identity | % Identity |
|---|---|---|---|---|
| Putative Role | Encoded | Groups of | in | Between |
| of Polypeptide | by Orf | Homology | Group | Groups |
| RlrA, | 2 | 1 group (10 strains) | 100 | — |
| transcriptional | | | | |
| regulator | | | | |
| RrgA, cell | 3 | 2 groups (6 + 4) | 98-100 | 83 |
| wall surface | | | | |
| protein | | | | |
| RrgB, cell | 4 | 2 groups (6 + 4) | 99-100 | 48 |
| wall surface | | | | |
| protein | | | | |
| RrgC, cell | 5 | 2 groups (6 + 4) | 99-100 | 97 |
| wall surface | | | | |
| protein | | | | |
| SrtB, putative | 6 | 2 groups (7 + 3) | 99-100 | 97 |
| sortase | | | | |
| SrtC, putative | 7 | 2 groups (6 + 4) | 95-100 | 93 |
| sortase | | | | |
| SrtD, putative | 8 | 2 groups (6 + 4) | 99-100 | 92 |
| sortase | | | | |

[0898] The division of homology between the RrgB polypeptide in the S. pneumoniae strains is due a lack of amino acid sequence identity in the central amino acid residues. Amino acid residues 1-30 and 617-665 are identical for each of the ten S. pneumoniae strains. However, amino acid residues 31-616 share between 42 and 100 percent identity between strains. See FIG. 149. The shared N- and C-terminal regions of identity in the RrgB polypeptides may be preferred portions of the RrgB polypeptide for use in an immunogenic composition. Similarly, shared regions of identity in any of the polypeptides encoded by the S. pneumoniae AI locus may be preferable for use in immunogenic compositions. One of skill in the art, using the amino acid alignments provided in FIGS. 141-147, would readily be able to determine these regions of identity.

[0899] The S. pneumoniae comprising these AI loci do, in fact, express high molecular weight polymers on their surface, indicating the presence of pili. See FIG. 182, which shows detection of high molecular weight structures expressed by S. pneumoniae strains that comprise the adhesin island locus depicted in FIG. 137, these strains are indicated as rlrA+. Confirming these findings, electron microscopy and negative staining detects the presence of pili extending from the surface of S. pneumoniae. See FIG. 185. To demonstrate that the adhesin island locus was responsible for the pili, the rrgA-srtD region of TIGR 4 were deleted. Deletion of this region of the adhesin island resulted in a loss of pili expression. See FIG. 186. See also FIG. 235, which provides an electron micrograph of S. pneumoniae lacking the rrgA-srtD region immunogold stained using anti-RrgB and anti-RrgC antibodies. No pili can be seen. Similarly to that described above, a S. pneumoniae bacteria that lacks a transcriptional repressor, mgrA, of genes in the adhesin island expresses pili. See FIG. 187. However, and as expected, a S. pneumoniae bacteria that lacks both the mgrA and adhesin island genes in the rrgA-srtD region does not express pili. See FIG. 188.

[0900] These high molecular weight pili structures appear to play a role in adherence of S. pneumoniae to cells. S. pneumoniae TIGR4 that lack the pilus operon have significantly diminished ability to adhere to A549 Alveolar cells in vitro. See FIG. 184.

[0901] The Sp0463 (S. pneumoniae TIGR4 rrgB) adhesion island polypeptide is expressed in oligomeric form. Whole cell extracts were analyzed by Western blot using a Sp0463 antiserum. The antiserum cross-hybridized with high molecular weight Sp0463 polymers. See FIG. 156. The antiserum did not cross-hybridize with polypeptides from D39 or R6 strains of S. pneumoniae, which do not contain the AI locus depicted in FIG. 137. Immunogold labelling of S. pneumoniae TIGR 4 using RrgB antiserum confirms the presence of RrgB in pili. FIG. 189 shows double-labeling of S. pneumoniae TIGR 4 bacteria with immunolabeling for RrgB (5 nm gold particles) and RrgC (10 nm gold particles) protein. The RrgB protein is detected as present at intervals along the pilus structure. The RrgC protein is detected at the tips of the pili. See FIG. 234 at arrows; FIG. 234 is a close up of a pilus in FIG. 189 at the location indicated by *.

[0902] The RrgA protein appears to be present in and necessary for formation of high molecular weight structures on the surface of S. pneumoniae TIGR4. See FIG. 181 which provides the results of Western blot analysis of TIGR4 S. pneumoniae lacking the gene encoding RrgA. No high molecular weight structures are detected in S. pneumoniae that do not express RrgA using antiserum raised against RrgB. See also FIG. 183.

[0903] A detailed diagram of the amino acid sequence comparions of the RrgA protein in the ten S. pneumoniae strains is shown in FIG. 148. The diagram reveals the division of the individual S. pneumoniae strains into the two different homology groups.

[0904] The cell surface polypeptides encoded by the S. pneumoniae TIGR4 AI, Sp0462 (rrgA), Sp0463 (rrgB), and Sp0464 (rrgC), have been cloned and expressed. See examples 15-17. A polyacrylamide gel showing successful recombinant expression of RrgA is provided in FIG. 190A. Detection of the RrgA protein, which is expressed in pET21b with a histidine tag, is also shown by Western blot analysis in FIG. 190B, using an anti-histidine tag antibody.

[0905] Antibodies that detect RrgB and RrgC antibodies have been produced in mice. See FIGS. 191 and 192, which show detection of RrgB and RrgC, respectively, using the raised antibodies.

[0906] In addition to the identification of these S. pneumoniae adhesion islands, coding sequences for SrtB type sortases have been identified in several S. pneumoniae clinical isolates, demonstrating conservation of a SrtB type sortase across these isolates.

Recombinantly Produced AI polypeptides

[0907] It is also an aspect of the invention to alter a non-AI polypeptide to be expressed as an AI polypeptide. The non-AI polypeptide may be genetically manipulated to additionally contain AI polypeptide sequences, e.g., a sortase substrate, pilin, or E-box motif, which may cause expression of the non-AI polypeptide as an AI polypeptide. Alternatively the non-AI polypeptide may be genetically manipulated to replace an amino acid sequence within the non-AI polypeptide for AI polypeptide sequences, e.g., a sortase substrate, pilin, or E-box motif, which may cause expression of the non-AI polypeptide as an AI polypeptide. Any number of amino acid residues may be added to the non-AI polypeptide or may be replaced within the non-AI polypeptide to cause its expression as an AI polypeptide. At least 5, 6, 7, 8, 9, 10, 15, 20, 25, 30, 35, 50, 75, 100, 150, 200, or 250 amino acid residues may be replaced or added to the non-AI polypeptide amino acid sequence. GBS 322 may be one such non-AI polypeptide that may be expressed as an AI polypeptide.

GBS Adhesin Island Sequences

[0908] The GBS AI polypeptides of the invention can, of course, be prepared by various means (e.g. recombinant expression, purification from GBS, chemical synthesis etc.) and in various forms (e.g. native, fusions, glycosylated, non-glycosylated etc.). They are preferably prepared in substantially pure form (i.e. substantially free from other streptococcal or host cell proteins) or substantially isolated form.

[0909] The GBS AI proteins of the invention may include polypeptide sequences having sequence identity to the identified GBS proteins. The degree of sequence identity may vary depending on the amino acid sequence (a) in question, but is preferably greater than 50% (e.g. 60%, 65%, 70%, 75%, 80%, 85%, 90%, 91%, 92%, 93%, 94%, 95%, 96%, 97%, 98%, 99%, 99.5% or more). Polypeptides having sequence identity include homologs, orthologs, allelic variants and functional mutants of the identified GBS proteins. Typically, 50% identity or more between two proteins is considered to be an indication of functional equivalence. Identity between proteins is preferably determined by the Smith-Waterman homology search algorithm as implemented in the MPSRCH program (Oxford Molecular), using an affinity gap search with parameters gap open penalty=]12 and gap extension penalty=1.

[0910] The GBS adhesin island polynucleotide sequences may include polynucleotide sequences having sequence identity to the identified GBS adhesin island polynucleotide sequences. The degree of sequence identity may vary depending on the polynucleotide sequence in question, but is preferably greater than 50% (e.g. 60%, 65%, 70%, 75%, 80%, 85%, 90%, 91%, 92%, 93%, 94%, 95%, 96%, 97%, 98%, 99%, 99.5% or more).

[0911] The GBS adhesin island polynucleotide sequences of the invention may include polynucleotide fragments of the identified adhesin island sequences. The length of the fragment may vary depending on the polynucleotide sequence of the specific adhesin island sequence, but the fragment is preferably at least 10 consecutive polynucleotides, (e.g. at least 10, 12, 14, 16, 18, 20, 25, 30, 35, 40, 50, 60, 70, 80, 90, 100, 150, 200 or more).

[0912] The GBS adhesin island amino acid sequences of the invention may include polypeptide fragments of the identified GBS proteins. The length of the fragment may vary depending on the amino acid sequence of the specific GBS antigen, but the fragment is preferably at least 7 consecutive amino acids, (e.g. 8, 10, 12, 14, 16, 18, 20, 25, 30, 35, 40, 50, 60, 70, 80, 90, 100, 150, 200 or more). Preferably the fragment comprises one or more epitopes from the sequence. Other preferred fragments include (1) the N-terminal signal peptides of each identified GBS protein, (2) the identified GBS protein without their N-terminal signal peptides, and (3) each identified GBS protein wherein up to 10 amino acid residues (e.g. 1, 2, 3, 4, 5, 6, 7, 8, 9, 10, 15, 20, 25 or more) are deleted from the N-terminus and/or the C-terminus e.g. the N-terminal amino acid residue may be deleted. Other fragments omit one or more domains of the protein (e.g. omission of a signal peptide, of a cytoplasmic domain, of a transmembrane domain, or of an extracellular domain).

GBS 80

[0913] Examples of preferred GBS 80 fragments are discussed below. Polynucleotide and polypeptide sequences of GBS 80 from a variety of GBS serotypes and strain isolates are set forth in FIGS. 18 and 22. The polynucleotide and polypeptide sequences for GBS 80 from GBS serotype V, strain isolate 2603 are also included below as SEQ ID NOS 1 and 2:

SEQ ID NO.1
ATGAAATTATCGAAGAAGTTATTGTTTTCGGCTGCTGTTTTAACAATGGT
GGCGGGGTCAACTGTTGAACCAGTAGCTCAGTTTGCGACTGGAATGAGTA
TTGTAAGAGCTGCAGAAGTGTCACAAGAACGCCCAGCGAAAACAACAGTA
AATATCTATAAATTACAAGCTGATAGTTATAAATCGGAAATTACTTCTAA
TGGTGGTATCGAGAATAAAGACGGCGAAGTAATATCTAACTATGCTAAAC
TTGGTGACAATGTAAAAGGTTTGCAAGGTGTACAGTTTAAACGTTATAAA
GTCAAGACGGATATTTCTGTTGATGAATTGAAAAAATTGACAACAGTTGA
AGCAGCAGATGCAAAAGTTGGAACGATTCTTGAAGAAGGTGTCAGTCTAC
CTCAAAAAACTAATGCTCAAGGTTTGGTCGTCGATGCTCTGGATTCAAAA
AGTAATGTGAGATACTTGTATGTAGAAGATTTAAAGAATTCACCTTCAAA
CATTACCAAAGCTTATGCTGTACCGTTTGTGTTGGAATTACCAGTTGCTA
ACTCTACAGGTACAGGTTTCCTTTCTGAAATTAATATTTACCCTAAAAAC
GTTGTAACTGATGAACCAAAAACAGATAAAGATGTTAAAAAATTAGGTCA
GGACGATGCAGGTTATACGATTGGTGAAGAATTCAAATGGTTCTTGAAAT
CTACAATCCCTGCCAATTTAGGTGACTATGAAAAATTTGAAATTACTGAT
AAATTTGCAGATGGCTTGACTTATAAATCTGTTGGAAAAATCAAGATTGG
TTCGAAAACACTGAATAGAGATGAGCACTACACTATTGATGAACCAACAG
TTGATAACCAAAATACATTAAAAATTACGTTTAAACCAGAGAAATTTAAA
GAAATTGCTGAGCTACTTAAAGGAATGACCCTTGTTAAAAATCAAGATGC
TCTTGATAAAGCTACTGCAAATACAGATGATGCGGCATTTTTGGAAATTC
CAGTTGCATCAACTATTAATGAAAAAGCAGTTTTAGGAAAAGCAATTGAA
AATACTTTTGAACTTCAATATGACCATACTCCTGATAAAGCTGACAATCC
AAAACCATCTAATCCTCCAAGAAAACCAGAAGTTCATACTGGTGGGAAAC
GATTTGTAAAGAAAGACTCAACAGAAACACAAACACTAGGTGGTGCTGAG
TTTGATTTGTTGGCTTCTGATGGGACAGCAGTAAAATGGACAGATGCTCT
TATTAAAGCGAATACTAATAAAAACTATATTGCTGGAGAAGCTGTTACTG
GGCAACCAATCAAATTGAAATCACATACAGACGGTACGTTTGAGATTAAA
GGTTTGGCTTATGCAGTTGATGCGAATGCAGAGGGTACAGCAGTAACTTA
CAAATTAAAAGAAACAAAAGCACCAGAAGGTTATGTAATCCCTGATAAAG
AAATCGAGTTTACAGTATCACAAACATCTTATAATACAAAACCAACTGAC
ATCACGGTTGATAGTGCTGATGCAACACCTGATACAATTAAAAACAACAA
ACGTCCTTCAATCCCTAATACTGGTGGTATTGGTACGGCTATCTTTGTCG
CTATCGGTGCTGCGGTGATGGCTTTTGCTGTTAAGGGGATGAAGCGTCGT
ACAAAAGATAAC
SEQ ID NO: 2
MKLSKKLLFSAAVLTMVAGSTVEPVAQFATGMSIVRAAEVSQERPAKTTV
NIYKLQADSYKSEITSNGGIENKDGEVISNYAKLGDNVKGLQGVQFKRYK
VKTDISVDELKKLTTVEAADAKVGTILEEGVSLPQKTNAQGLVVDALDSK
SNVRYLYVEDLKNSPSNITKAYAVPFVLELPVANSTGTGFLSEINIYPKN
VVTDEPKTDKDVKKLGQDDAGYTIGEEFKWFLKSTIPANLGDYEKFEITD
KFADGLTYKSVGKIKIGSKTLNRDEHYTIDEPTVDNQNTLKITFKPEKFK
EIAELLKGMTLVKNQDALDKATANTDDAAFLEIPVASTINEKAVLGKAIE
NTFELQYDHTPDKADNPKPSNPPRKPEVHTGGKRFVKKDSTETQTLGGAE
FDLLASDGTAVKWTDALIKANTNKNYIAGEAVTGQPIKLKSHTDGTFEIK
GLAYAVDANAEGTAVTYKLKETKAPEGYVIPDKEIEFTVSQTSYNTKPTD
ITVDSADATPDTIKNNKRPSIPNTGGIGTAIFVAIGAAVMAFAVKGMKRR
TKDN

[0914] As described above, the compositions of the invention may include fragments of AI proteins. In some instances, removal of one or more domains, such as a leader or signal sequence region, a transmembrane region, a cytoplasmic region or a cell wall anchoring motif, may facilitate cloning of the gene encoding the protein and/or recombinant expression of the GBS AI protein. In addition, fragments comprising immunogenic epitopes of the cited GBS AI proteins may be used in the compositions of the invention.

[0915] For example, GBS 80 contains an N-terminal leader or signal sequence region which is indicated by the underlined sequence at the beginning of SEQ ID NO: 2 above. In one embodiment, one or more amino acids from the leader or signal sequence region of GBS 80 are removed. An example of such a GBS 80 fragment is set forth below as SEQ ID NO: 3:

SEQ ID NO: 3

AEVSQERPAKTTVNIYKLQADSYKSEITSNGGIENKDGEVISNYAKLGDN
VKGLQGVQFKRYKVKTDISVDELKKLTTVEAADAKVGTILEEGVSLPQKT
NAQGLVVDALDSKSNVRYLYVEDLKNSPSNITKAYAVPFVLELPVANSTG
TGFLSEINIYPKNVVTDEPKTDKDVKKLGQDDAGYTIGEEFKWFLKSTIP
ANLGDYEKFEITDKFADGLTYKSVGKIKIGSKTLNRDEHYTIDEPTVDNQ
NTLKITFKPEKFKEIAELLKGMTLVKNQDALDKATANTDDAAFLEIPVAS
TINEKAVLGKAIENTFELQYDHTPDKADNPKPSNPPRKPEVHTGGKRFVK
KDSTETQTLGGAEFDLLASDGTAVKWTDALIKANTNKNYIAGEAVTGQPI
KLKSHTDGTFEIKGLAYAVDANAEGTAVTYKLKETKAPEGYVIPDKEIEF
TVSQTSYNTKPTDITVDSADATPDTIKNNKRPSIPNTGGIGTAIFVAIGA
AVMAFAVKGMKRRTKDN

[0916] GBS 80 contains a C-terminal transmembrane region which is indicated by the underlined sequence near the end of SEQ ID NO: 2 above. In one embodiment, one or more amino acids from the transmembrane region and/or a cytoplasmic region are removed. An example of such a GBS 80 fragment is set forth below as SEQ ID NO: 4:

SEQ ID NO: 4

MKLSKKLLFSAAVLTMVAGSTVEPVAQFATGMSIVRAAEVSQERPAKTTV
NIYKLQADSYKSEITSNGGIENKDGEVISNYAKLGDNVKGLQGVQFKRYK
VKTDISVDELKKLTTVEAADAKVGTILEEGVSLPQKTNAQGLVVDALDSK
SNVRYLYVEDLKNSPSNITKAYAVPFVLELPVANSTGTGFLSEINIYPKN
VVTDEPKTDKDVKKLGQDDAGYTIGEEFKWFLKSTIPANLGDYEKFEITD
KFADGLTYKSVGKIKIGSKTLNRDEHYTIDEPTVDNQNTLKITFKPEKFK
EIAELLKGMTLVKNQDALDKATANTDDAAFLEIPVASTINEKAVLGKAIE
NTFELQYDHTPDKADNPKPSNPPRKPEVHTGGKRFVKKDSTETQTLGGAE
FDLLASDGTAVKWTDALIKANTNKNYIAGEAVTGQPIKLKSHTDGTFEIK
GLAYAVDANAEGTAVTYKLKETKAPEGYVIPDKEIEFTVSQTSYNTKPTD
ITVDSADATPDTIKNNKRPSIPNTG

[0917] GBS 80 contains an amino acid motif indicative of a cell wall anchor: SEQ ID NO: 5 IPNTG (shown in italics in SEQ ID NO: 2 above). In some recombinant host cell systems, it may be preferable to remove this motif to facilitate secretion of a recombinant GBS 80 protein from the host cell. Accordingly, in one preferred fragment of GBS 80 for use in the invention, the transmembrane and/or cytoplasmic regions and the cell wall anchor motif are removed from GBS 80. An example of such a GBS 80 fragment is set forth below as SEQ ID NO: 6.

SEQ ID NO: 6

MKLSKKLLFSAAVLTMVAGSTVEPVAQFATGMSIVRAAEVSQERPAKTTV
NIYKLQADSYKSEITSNGGIENKDGEVISNYAKLGDNVKGLQGVQFKRYK
VKTDISVDELKKLTTVEAADAKVGTILEEGVSLPQKTNAQGLVVDALDSK
SNVRYLYVEDLKNSPSNITKAYAVPFVLELPVANSTGTGFLSEINIYPKN
VVTDEPKTDKDVKKLGQDDAGYTTGEEFKWFLKSTTPANLGDYEKFEITD
KFADGLTYKSVGKIKIGSKTLNRDEHYTIDEPTVDNQNTLKTTFKPEKFK
EIAELLKGMTLVKNQDALDKATANTDDAAELEIPVASTLNEKAVLGKAIE
NTFELQYDHTPDKADNPKPSNPPRKPEVHTGGKRFVKKDSTETQTLGGAE
FDLLASDGTAVKWTDALIKANTNKNYIAGEAVTGQPIKLKSHTDGTFEIK
GLAYAVDANAEGTAVTYKLKETKAPEGYVIPDKEIEFTVSQTSYNTKPTD
ITVDSADATPDTIKNNKRPS

[0918] Alternatively, in some recombinant host cell systems, it may be preferable to use the cell wall anchor motif to anchor the recombinantly expressed protein to the cell wall. The extracellular domain of the expressed protein may be cleaved during purification or the recombinant protein may be left attached to either inactivated host cells or cell membranes in the final composition.

[0919] In one embodiment, the leader or signal sequence region, the transmembrane and cytoplasmic regions and the cell wall anchor motif are removed from the GBS 80 sequence. An example of such a GBS 80 fragment is set forth below as SEQ ID NO: 7.

SEQ ID NO: 7

AEVSQERPAKTTVNIYKLQADSYKSEITSNGGIENKDGEVISNYAKLGDN
VKGLQGVQFKRYKVKTDISVDELKKLTTVEAADAKVGTILEEGVSLPQKT
NAQGLVVDALDSKSNVRYLYVEDLKNSPSNITKAYAVPFVLELPVANSTG
TGFLSEINIYPKNVVTDEPKTDKDVKKLGQDDAGYTIGEEFKWFLKSTIP
ANLGDYEKFEITDKFADGLTYKSVGKIKIGSKTLNRDEHYTIDEPTVDNQ
NTLKITFKPEKFKEIAELLKGMTLVKNQDALDKATANTDDAAFLEIPVAS
TINEKAVLGKAIENTFELQYDHTPDKADNPKPSNPPRKPEVHTGGKRFVK
KDSTETQTLGGAEFDLLASDGTAVKWTDALIKANTNKNYIAGEAVTGQPI
KLKSHTDGTFEIKGLAYAVDANAEGTAVTYKLKETKAPEGYVIPDKEIEF
TVSQTSYNTKPTDITVDSADATPDTIKNNKRPS

[0920] Applicants have identified a particularly immunogenic fragment of the GBS 80 protein. This immunogenic fragment is located towards the N-terminus of the protein and is underlined in the GBS 80 SEQ ID NO: 2 sequence below. The underlined fragment is set forth below as SEQ ID NO: 8.

SEQ ID NO: 2

MKLSKKLLFSAAVLTMVAGSTVEPVAQFATGMSIVRAAEVSQERPAKTTV
NIYKLQADSYKSEITSNGGIENKDGEVISNYAKLGDNVKGLQGVQFKRYK
VKTDISVDELKKLTTVEAADAKVGTILEEGVSLPQKTNAQGLVVDALDSK
SNVRYLYVEDLKNSPSNITKAYAVPFVLELPVANSTGTGFLSEINIYPKN
VVTDEPKTDKDVKKLGQDDAGYTIGEEFKWFLKSTIPANLGDYEKFEITD
KFADGLTYKSVGKIKIGSKTLNRDEHYTIDEPTVDNQNTLKTTFKPEKFK
EIAELLKGMTLVKNQDALDKATANTDDAAFLEIPVASTINEKAVLGKAIE
NTFELQYDHTPDKADNPKPSNPPRKPEVHTGGKRFVKKDSTETQTLGGAE
FDLLASDGTAVKWTDALIKANTNKNYIAGEAVTGQPIKLKSHTDGTFEIK
GLAYAVDANAEGTAVTYKLKETKAPEGYVIPDKEIEFTVSQTSYNTKPTD
ITVDSADATPDTIKNNKRPSIPNTGGIGTAIFVAIGAAVMAFAVKGMKRR
TKDN

SEQ ID NO: 8

AEVSQERPAKTTVNIYKLQADSYKSEITSNGGIENKDGEVISNYAKLGDN
VKGLQGVQFKRYKVKTDISVDELKKLTTVEAADAKVGTILEEGVSLPQKT
NAQGLVVDALDSKSNVRYLYVEDLKNSPSNITKAYAVPFVLELPVANSTG
TGFLSEINIYPKNVVTDEPKTDKDVKKLGQDDAGYTIGEEFKWFLKSTIP
ANLGDYEKFEITDKFADGLTYKSVGKIKIGSKTLNRDEHYTIDEPTVDNQ
NTLKITFKPEKFKEIAELLKG

[0921] The immunogenicity of the protein encoded by SEQ ID NO: 7 was compared against PBS, GBS whole cell, GBS 80 (full length) and another fragment of GBS 80, located closer to the C-terminus of the peptide (SEQ ID NO: 9, below).

SEQ ID NO: 9

MTLVKNQDALDKATANTDDAAFLEIPVASTINEKAVLGKAIENTFELQYD
HTPDKADNPKPSNPPRKPEVHTGGKRFVKKDSTETQTLGGAEFDLLASDG
TAVKWTDALIKANTNKNYIAGEAVTGQPIKLKSHTDGTFEIKGLAYAVDA
NAEGTAVTYKLKETKAPEGYVIPDKEIEFTVSQTSYNTKPTDITVDSADA
TPDTIKNNKRPS

[0922] Both an Active Maternal Immunization Assay and a Passive Maternal Immunization Assay were conducted on this collection of proteins.

[0923] As used herein, an Active Maternal Immunization assay refers to an in vivo protection assay where female mice are immunized with the test antigen composition. The female mice are then bred and their pups are challenged with a lethal dose of GBS. Serum titers of the female mice during the immunization schedule are measured as well as the survival time of the pups after challenge.

[0924] Specifically, the Active Maternal Immunization assays referred to herein used groups of four CD-1 female mice (Charles River Laboratories, Calco Italy). These mice were immunized intraperitoneally with the selected proteins in Freund's adjuvant at days 1, 21 and 35, prior to breeding. 6-8 weeks old mice received 20 μg protein/dose when immunized with a single antigen, 30-45 μg protein/dose (15 μg each antigen) when immunized with combination of antigens. The immune response of the dams was monitored by using serum samples taken on day 0 and 49. The female mice were bred 2-7 days after the last immunization (at approximately t=36-37), and typically had a gestation period of 21 days. Within 48 hours of birth, the pups were challenged via I.P. with GBS in a dose approximately equal to a amount which would be sufficient to kill 70-90% of unimmunized pups (as determined by empirical data gathered from PBS control groups). The GBS challenge dose is preferably administered in 50 μl of THB medium. Preferably, the pup challenge takes place at 56 to 61 days after the first immunization. The challenge inocula were prepared starting from frozen cultures diluted to the appropriate concentration with THB prior to use. Survival of pups was monitored for 5 days after challenge.

[0925] As used herein, the Passive Maternal Immunization Assay refers to an in vivo protection assay where pregnant mice are passively immunized by injecting rabbit immune sera (or control sera) approximately 2 days before delivery. The pups are then challenged with a lethal dose of GBS.

[0926] Specifically, the Passive Maternal Immunization Assay referred to herein used groups of pregnant CD1 mice which were passively immunized by injecting 1 ml of rabbit immune sera or control sera via I.P., 2 days before delivery. Newborn mice (24-48 hrs after birth) are challenged via I.P. with a 70-90% lethal dose of GBS serotype II COH1. The challenge dose, obtained by diluting a frozen mid log phase culture, was administered in 50 μl of THB medium.

For both assays, the number of pups surviving GBS infection was assessed every 12 hrs for 4 days. Statistical significance was estimated by Fisher's exact test.

[0927] The results of each assay for immunization with SEQ ID NO: 7, SEQ ID NO: 8, PBS and GBS whole cell are set forth in Tables 1 and 2 below.

TABLE 1
Immunization

| Antigen | Alive/total | % Survival | Fisher's exact test |
|---|---|---|---|
| PBS (neg control) | 13/80 | 16% | |
| GBS (whole cell) | 54/65 | 83% | P < 0.00000001 |
| GBS80 (intact) | 62/70 | 88% | P < 0.00000001 |
| GBS80 (fragment) | 35/64 | 55% | P = 0.0000013 |
| SEQ ID 7 | | | |
| GBS80 (fragment) | 13/67 | 19% | P = 0.66 |
| SEQ ID 8 | | | |

[0928] TABLE 2
Passive Maternal Immunization

| Antigen | Alive/total | % Survival | Fisher's exact test |
|---|---|---|---|
| PBS (neg control) | 12/42 | 28% | |
| GBS (whole cell) | 48/52 | 92% | P < 0.00000001 |
| GBS80 (intact) | 48/55 | 87% | P < 0.00000001 |
| GBS80 (fragment) | 45/57 | 79% | P = 0.0000006 |
| SEQ ID 7 | | | |
| GBS80 (fragment) | 13/54 | 24% | P = 1 |
| SEQ ID 8 | | | |

[0929] As shown in Tables 1 and 2, immunization with the SEQ ID NO: 7 GBS 80 fragment provided a substantially improved survival rate for the challenged pups than the comparison SEQ ID NO: 8 GBS 80 fragment. These results indicate that the SEQ ID NO: 7 GBS 80 fragment may comprise an important immunogenic epitope of GBS 80.

[0930] As discussed above, pilin motifs, containing conserved lysine (K) residues have been identified in GBS 80. The pilin motif sequences are underlined in SEQ ID NO: 2, below. Conserved lysine (K) residues are marked in bold, at amino acid residues 199 and 207 and at amino acid residues 368 and 375. The pilin sequences, in particular the conserved lysine residues, are thought to be important for the formation of oligomeric, pilus-like structures of GBS 80. Preferred fragments of GBS 80 include at least one conserved lysine residue. Preferably, fragments include at least one pilin sequence.

SEQ ID NO: 2

MKLSKKLLFSAAVLTMVAGSTVEPVAQFATGMSIVRAAEVSQERPAKTTV
NIYKLQADSYKSEITSNGGIENKDGEVISNYAKLGDNVKGLQGVQFKRYK
VKTDISVDELKKLTTVEAADAKVGTILEEGVSLPQKTNAQGLVVDALDSK
SNVRYLYVEDLKNSPSNITKAYAVPFVLELPVANSTGTGFLSEINIYPKN
VVTDEPKTDKDVKKLGQDDAGYTIGEEFKWFLKSTIPANLGDYEKFEITD
KFADGLTYKSVGKIKIGSKTLNRDEHYTIDEPTVDNQNTLKITFKPEKFK
EIAELLKGMTLVKNQDALDKATANTDDAAFLEIPVASTINEKAVLGKAIE
NTFELQYDHTPDKADNPKPSNPPRKPEVHTGGKRFVKKDSTETQTLGGAE
FDLLASDGTAVKWTDALIKANTNKNYIAGEAVTGQPIKLKSHTDGTFEIK
GLAYAVDANAEGTAVTYKLKETKAPEGYVIPDKEIEFTVSQTSYNTKPTD
ITVDSADATPDTIKNNKRPSIPNTGGIGTAIFVAIGAAVMAFAVKGMKRR
TKDN

[0931] E boxes containing conserved glutamic residues have also been identified in GBS 80. The E box motifs are underlined in SEQ ID NO: 2 below. The conserved glutamic acid (E) residues, at amino acid residues 392 and 471, are marked in bold. The E box motifs, in particular the conserved glutamic acid residues, are thought to be important for the formation of oligomeric pilus-like structures of GBS 80. Preferred fragments of GBS 80 include at least one conserved glutamic acid residue. Preferably, fragments include at least one E box motif.

SEQ ID NO: 2

MKLSKKLLFSAAVLTMVAGSTVEPVAQFATGMSIVRAAEVSQERPAKTTV
NIYKLQADSYKSEITSNGGIENKDGEVISNYAKLGDNVKGLQGVQFKRYK
VKTDISVDELKKLTTVEAADAKVGTILEEGVSLPQKTNAQGLVVDALDSK
SNVRYLYVEDLKNSPSNITKAYAVPFVLELPVANSTGTGFLSEINIYPKN
VVTDEPKTDKDVKKLGQDDAGYTIGEEFKWFLKSTTPANLGDYEKEEITD
KFADGLTYKSVGKIKIGSKTLNRDLHYTIDEPTVDNQNTLKITFKPEKFK
EIAELLKGMTLVKNQDALDKATANTDDAAFLEIPVASTINEKAVLGKAIE
NTFELQYDHTPDKADNPKPSNPPRKPEVHTGGKRFVKKDSTETQTLGGAE
FDLLASDGTAVKWTDALIKANTNKNYIAGEAVTGQPIKLKSHTDGTFEIK
GLAYAVDANAEGTAVTYKLKETKAPEGYVIPDKEIEFTVSQTSYNTKPTD
ITVDSADATPDTIKNNKRPSIPNTGGIGTAIFVAIGAAVMAFAVKGMKRR
TKDN

[0932] Similarly, the following offers examples of preferred GBS 104 fragments. Nucleotide and amino acid sequences of GBS 104 sequenced from serotype V isolated strain 2603 are set forth below as SEQ ID NOS 10 and 11:

SEQ ID NO. 10

ATGAAAAAGAGACAAAAAATATGGAGAGGGTTATCAGTTACTTTACTAAT
CCTGTCCCAAATTCCATTTGGTATATTGGTACAAGGTGAAACCCAAGATA
CCAATCAAGCACTTGGAAAAGTAATTGTTAAAAAAACGGGAGACAATGCT
ACACCATTAGGCAAAGCGACTTTTGTGTTAAAAAATGACAATGATAAGTC
AGAAACAAGTCACGAAACGGTAGAGGGTTCTGGAGAAGCAACCTTTGAAA
ACATAAAACCTGGAGACTACACATTAAGAGAAGAAACAGCACCAATTGGT
TATAAAAAAACTGATAAAACCTGGAAAGTTAAAGTTGCAGATAACGGAGC
AACAATAATCGAGGGTATGGATGCAGATAAAGCAGAGAAACGAAAAGAAG
TTTTGAATGCCCAATATCCAAAATCAGCTATTTATGAGGATACAAAAGAA
AATTACCCATTAGTTAATGTAGAGGGTTCCAAAGTTGGTGAACAATACAA
AGCATTGAATCCAATAAATGGAAAAGATGGTCGAAGAGAGATTGCTGAAG
GTTGGTTATCAAAAAAAATTACAGGGGTCAATGATCTCGATAAGAATAAA
TATAAAATTGAATTAACTGTTGAGGGTAAAACCACTGTTGAAACGAAAGA
ACTTAATCAACCACTAGATGTCGTTGTGCTATTAGATAATTCAAATAGTA
TGAATAATGAAAGAGCCAATATATTCTCAAAGAGCATTAAAAGCTGGGAA
GCAGTTGAAAAGCTGATTGATAAAATTACATCAAATAAAGACAATAGAGT
AGCTCTTGTGACATATGCCTCAACCATTTTTGATGGTACTGAAGCGACCG
TATCAAAGGGAGTTGCCGATCAAAATGGTAAAGCGCTGAATGATAGTGTA
TCATGGGATTATCATAAAACTACTTTTACAGCAACTACACATAATTACAG
TTATTTAAATTTAACAAATGATGCTAACGAAGTTAATATTCTAAAGTCAA
GAATTCCAAAGGAAGCGGAGCATATAAATGGGGATCGCACGCTCTATCAA
TTTGGTGCGACATTTACTCAAAAAGCTCTAATGAAAGCAAATGAAATTTT
AGAGACACAAAGTTCTAATGCTAGAAAAAAACTTATTTTTCACGTAACTG
ATGGTGTCCCTACGATGTCTTATGCCATAAATTTTAATCCTTATATATCA
ACATCTTACCAAAACCAGTTTAATTCTTTTTTAAATAAAATACCAGATAG
AAGTGGTATTCTCCAAGAGGATTTTATAATCAATGGTGATGATTATCAAA
TAGTAAAAGGAGATGGAGAGAGTTTTAAACTGTTTTCGGATAGAAAAGTT
CCTGTTACTGGAGGAACGACACAAGCAGCTTATCGAGTACCGCAAAATCA
ACTCTCTGTAATGAGTAATGAGGGATATGCAATTAATAGTGGATATATTT
ATCTCTATTGGAGAGATTACAACTGGGTCTATCCATTTGATCCTAAGACA
AAGAAAGTTTCTGCAACGAAACAAATCAAAACTCATGGTGAGCCAACAAC
ATTATACTTTAATGGAAATATAAGACCTAAAGGTTATGACATTTTTACTG
TTGGGATTGGTGTAAACGGAGATCCTGGTGCAACTCCTCTTGAAGCTGAG
AAATTTATGCAATCAATATCAAGTAAAACAGAAAATTATACTAATGTTGA
TGATACAAATAAAATTTATGATGAGCTAAATAAATACTTTAAAACAATTG
TTGAGGAAAAACATTCTATTGTTGATGGAAATGTGACTGATCCTATGGGA
GAGATGATTGAATTCCAATTAAAAAATGGTCAAAGTTTTACACATGATGA
TTACGTTTTGGTTGGAAATGATGGCAGTCAATTAAAAAATGGTGTGGCTC
TTGGTGGACCAAACAGTGATGGGGGAATTTTAAAAGATGTTACAGTGACT
TATGATAAGACATCTCAAACCATCAAAATCAATCATTTGAACTTAGGAAG
TGGACAAAAAGTAGTTCTTACCTATGATGTACGTTTAAAAGATAACTATA
TAAGTAACAAATTTTACAATACAAATAATCGTACAACGCTAAGTCCGAAG
AGTGAAAAAGAACCAAATACTATTCGTGATTTCCCAATTCCCAAAATTCG
TGATGTTCGTGAGTTTCCGGTACTAACCATCAGTAATCAGAAGAAAATGG
GTGAGGTTGAATTTATTAAAGTTAATAAAGACAAACATTCAGAATCGCTT
TTGGGAGCTAAGTTTCAACTTCAGATAGAAAAAGATTTTTCTGGGTATAA
GCAATTTGTTCCAGAGGGAAGTGATGTTACAACAAAGAATGATGGTAAAA
TTTATTTTAAAGCACTTCAAGATGGTAACTATAAATTATATGAAATTTCA
AGTCCAGATGGCTATATAGAGGTTAAAACGAAACCTGTTGTGACATTTAC
AATTCAAAATGGAGAAGTTACGAACCTGAAAGCAGATCCAAATGCTAATA
AAAATCAAATCGGGTATCTTGAAGGAAATGGTAAACATCTTATTACCAAC
ACTCCCAAACGCCCACCAGGTGTTTTTCCTAAAACAGGGGGAATTGGTAC
AATTGTCTATATATTAGTTGGTTCTACTTTTATGATACTTACCATTTGTT
CTTTCCGTCGTAAACAATTG

SEQ ID NO. 11

MKKRQKIWRGLSVTLLILSQIPFGILVQGETQDTNQALGKVIVKKTGDNA
TPLGKATFVLKNDNDKSETSHETVEGSGEATFENIKPGDYTLREETAPIG
YKKTDKTWKVKVADNGATIIEGMDADKAEKRKEVLNAQYPKSAIYEDTKE
NYPLVNVEGSKVGEQYKALNPINGKDGRREIAEGWLSKKTTGVNDLDKNK
YKIELTVEGKTTVETKELNQPLDVVVLLDNSNSMNNERANNSQRALKAGE
AVEKLIDKTTSNKDNRVALVTYASTIFDGTEATVSKGVADQNGKALNDSV
SWDYHKTTFTATTHNYSYLNLTNDANEVNILKSRIPKEAEHINGDRTLYQ
FGATFTQKALMKANEILETQSSNARKKLIFHVTDGVPTMSYAINFNPYTS
TSYQNQFNSFLNKIPDRSGILQEDFIINGDDYQIVKGDGESFKLFSDRKV
PVTGGTTQAAYRVPQNQLSVMSNEGYAINSGYIYLYWRDYNWVYPFDPKT
KKVSATKQIKTHGEPTTLYFNGNIRPKGYDIFTVGIGVNGDPGATPLEAE
KFMQSISSKTENYTNVDDTNKIYDELNKYFKTIVEEKHSIVDGNVTDPMG
EMIEFQLKNGQSFTHDDYVLVGNDGSQLKNGVALGGPNSDGGILKDVTVT
YDKTSQTIKINHLNLGSGQKVVLTYDVRLKDNYISNKEYNTNNRTTLSPK
SEKEPNTIRDFPIPKIRDVREFPVLTISNQKKMGEVEFIKVNKDKHSESL
LGAKFQLQIEKDFSGYKQFVPEGSDVTTKNDGKIYFKALQDGNYKLYEIS
SPDGYIEVKTKPVVTFTIQNGEVTNLKADPNANKNQIGYLEGNGKHLITN
TPKRPPGVFPKTGGIGTIVYILVGSTFMILTICSFRRKQL

[0933] GBS 104 contains an N-terminal leader or signal sequence region which is indicated by the underlined sequence at the beginning of SEQ ID NO 11 above. In one embodiment, one or more amino acid sequences from the leader or signal sequence region of GBS 104 are removed. An example of such a GBS 104 fragment is set forth below as SEQ ID NO 12.

SEQ ID NO: 12

GETQDTNQALGKVIVKKTGDNATPLGKATFVLKNDNDKSETSHETVEGSG
EATFENIKPGDYTLREETAPIGYKKTDKTWKVKVADNGATIIEGMDADKA
EKRKEVLNAQYPKSAIYEDTKENYPLVNVEGSKVGEQYKALNPINGKDGR
REIAEGWLSKKITGVNDLDKNKYKIELTVEGKTTVETKELNQPLDVVVLL
DNSNSMNNERANNSQPALKAGEAVEKLIDKITSNKDNRVALVTYASTIFD
GTEATVSKGVADQNGKALNDSVSWDYHKTTFTATTHNYSYLNLTNDANEV
NILKSRIPKEAEHINGDRTLYQFGATFTQKALMIANEILETQSSNARKKL
IFHVTDGVPTMSYAINFNPYISTSYQNQFNSFLNKIPDRSGILQEDFIIN
GDDYQIVKGDGESFKLFSDRKVPVTGGTTQAAYRVPQNQLSVMSNEGYAT
NSGYIYLYWRDYNWVYPFDPKTKKVSATKQIKTHGEPTTLYPNGNTRPKG
YDIFTVGIGVNGDPGATPLEAEKFMQSISSKTENYTNVDDTNKIYDELNK
YEKTIVEEKHSIVDGNVTDPMGEMIEFQLKNGQSPTHDDYVLVGNDGSQL
KNGVALGGPNSDGGILKDVTVTYDKTSQTIKINHLNLGSGQKVVLTYDVR
LKDNYISNKFYNTNNRTTLSPKSEKEPNTIRDFPIPKIRDVREFPVLTIS
NQKKMGEVEFIKVNKDKHSESLLGAKFQLQIEKDESGYKQFVPEGSDVTT
KNDGKIYFKALQDGNYKLYEISSPDGYIEVKTKPVVTFTIQNGEVTNLKA
DPNANKNQIGYLEGNGKHLITNTPKRPPGVFPKTGGIGTIVYILVGSTFM
ILTICSFRRKQL

[0934] GBS 104 contains a C-terminal transmembrane and/or cytoplasmic region which is indicated by the underlined region near the end of SEQ ID NO 11 above. In one embodiment, one or more amino acids from the transmembrane or cytomplasmic regions are removed. An example of such a GBS 104 fragment is set forth below as SEQ ID NO 13.

SEQ ID NO: 13

MKKRQKIWRGLSVTLLILSQIPFGILVQGETQDTNQALGKVIVKKTGDNA
TPLGKATFVLKNDNDKSETSHETVEGSGEATFENIKPGDYTLREETAPIG
YKKTDKTWKVKVADNGATIIEGMDADKAEKRKEVLNAQYPKSAIYEDTKE
NYPLVNVEGSKVGEQYKALNPINGKDGRREIAEGWLSKKITGVNDLDKNK
YKIELTVEGKTTVETKELNQPLDVVVLLDNSNSMNNERANNSQRALKAGE
AVEKLIDKITSNKDNRVALVTYASTIFDGTEATVSKGVADQNGKALNDSV
SWDYHKTTFTATTHNYSYLNLTNDANEVNILKSRIPKEAEHINGDRTLYQ
FGATFTQKALMKANEILETQSSNARKKLIFHVTDGVPTMSYAINFNPYIS
TSYQNQFNSFLNKIPDRSGTLQEDFIINGDDYQIVKGDGESFKLFSDRKV
PVTGGTTQAAYRVPQNQLSVMSNEGYAINSGYIYLYWRDYNWVYPFDPKT
KKVSATKQIKTHGEPTTLYFNGNTRPKGYDIFTVGIGVNGDPGATPLEAE
KFMQSISSKTENYTNVDDTNKIYDELNKYFKTIVEEKHSIVDGNVTDPMG
EMIEFQLKNGQSFTHDDYVLVGNDGSQLKNGVALGGPNSDGGILKDVTVT
YDKTSQTIKINHLNLGSGQKVVLTYDVRLKDNYISNKFYNTNNRTTLSPK
SEKEPNTIRDFPIPKIRDVREFPVLTISNQKKMGEVEFIKVNKDKHSESL
LGAKFQLQIEKDFSGYKQFVPEGSDVTTKNDGKTYFKALQDGNYKLYEIS
SPDGYIEVKTKPVVTFTIQNGEVTNLKADPNANKNQIGYLEGNGKHLITN
T

[0935] In one embodiment, one or more amino acids from the leader or signal sequence region and one or more amino acids from the transmembrane or cytoplasmic regions are removed. An example of such a GBS 104 fragment is set forth below as SEQ ID NO 14.

SEQ ID NO: 14

GETQDTNQALGKVIVKKTGDNATPLGKATFVLKNDNDKSETSHETVEGSG
EATFENIKPGDYTLREETAPIGYKKTDKTWKVKVADNGATIIEGMDADKA
EKRKEVLNAQYPKSAIYEDTKENYPLVNVEGSKVGEQYKALNPINGKDGR
REIAEGWLSKKITGVNDLDKNKYKIELTVEGKTTVETKELNQPLDVVVLL
DNSNSMNNERANNSQRALKAGEAVEKLIDKITSNKDNRVALVTYASTIFD
GTEATVSKGVADQNGKALNDSVSWDYHKTTFTATTHNYSYLNLTNDANEV
NILKSRIPKEAEHINGDRTLYQFGATFTQKALMKANEILETQSSNARKKL
IFHVTDGVPTMSYAINFNPYISTSYQNQFNSFLNKIPDRSGILQEDFIIN
GDDYQIVKGDGESFKLFSDRKVPVTGGTTQAAYRVPQNQLSVMSNEGYAI
NSGYIYLYWRDYNWVYPFDPKTKKVSATKQIKTHGEPTTLYFNGNIRPKG
YDIFTVGIGVNGDPGATPLEAEKFMQSISSKTENYTNVDDTNKIYDELNK
YFKTIVEEKHSIVDGNVTDPMGEMTEFQLKNGQSFTHDDYVLVGNDGSQL
KNGVALGGPNSDGGILKDVTVTYDKTSQTIKINHLNLGSGQKVVLTYDVR
LKDNYISNKFYNTNNRTTLSPKSEKEPNTIRDFPIPKIRDVREFPVLTIS
NQKKMGEVEFIKVNKDKHSESLLGAKFQLQIEKDFSGYKQFVPEGSDVTT
KNDGKIYEKALQDGNYKLYEISSPDGYIEVKTKPVVTFTTQNGEVTNLKA
DPNANKNQIGYLEGNGKHLITNT

[0936] GBS 104, like GBS 80, contains an amino acid motif indicative of a cell wall anchor: SEQ ID NO: 123 FPKTG (shown in italics in SEQ ID NO: 11 above). In some recombinant host cell systems, it may be preferable to remove this motif to facilitate secretion of a recombinant GBS 104 protein from the host cell. Accordingly, in one preferred fragment of GBS 104 for use in the invention, only the transmembrane and/or cytoplasmic regions and the cell wall anchor motif are removed from GBS 104. Alternatively, in some recombinant host cell systems, it may be preferable to use the cell wall anchor motif to anchor the recombinantly expressed protein to the cell wall. The extracellular domain of the expressed protein may be cleaved during purification or the recombinant protein may be left attached to either inactivated host cells or cell membranes in the final composition.

[0937] Two pilin motifs, containing conserved lysine (K) residues, have been identified in GBS 104. The pilin motif sequences are underlined in SEQ ID NO: 11, below. Conserved lysine (K) residues are marked in bold, at amino acid residues 141 and 149 and at amino acid residues 499 and 507. The pilin sequence, in particular the conserved lysine residues, are thought to be important for the formation of oligomeric, pilus-like structures of GBS 104. Preferred fragments of GBS 104 include at least one conserved lysine residue. Preferably, fragments include at least one pilin sequence.

SEQ ID NO. 11

MKKRQKIWRGLSVTLLILSQIPFGILVQGETQDTNQALGKVIVKKTGDNA
TPLGKATFVLKNDNDKSETSHETVEGSGEATFENIKPGDYTLREETAPIG
YKKTDKTWKVKVADNGATIIEGMDADKAEKRKEVLNAQYPKSAIYEDTKE
NYPLVNVEGSKVGEQYKALNPINGKDGRREIAEGWLSKKITGVNDLDKNK
YKIELTVEGKTTVETKELNQPLDVVVLLDNSNSMNNERANNSQRALKAGE
AVEKLIDKITSNKDNRVALVTYASTIFDGTEATVSKGVADQNGKALNDSV
SWDYHKTTFTATTHNYSYLNLTNDANEVNILKSRIPKEAEHINGDRTLYQ
FGATFTQKALMKANEILETQSSNARKKLIFHVTDGVPTMSYAINFNPYIS
TSYQNQFNSFLNKIPDRSGILQEDFIINGDDYQIVKGDGESEKLFSDRKV
PVTGGTTQAAYRVPQNQLSVMSNEGYAINSGYIYLYWRDYNWVYPFDPKT
KKVSATKQIKTHGEPTTLYFNGNIRPKGYDIFTVGIGVNGDPGATPLEAE
KFMQSISSKTENYTNVDDTNKIYDELNKYFKTIVEEKHSIVDGNVTDPMG
EMIEFQLKNGQSFTHDDYVLVGNDGSQLKNGVALGGPNSDGGILKDVTVT
YDKTSQTTKINHLNLGSGQKVVLTYDVRLKDNYISNKFYNTNNRTTLSPK
SEKEPNTIRDFPIPKIRDVREFPVLTISNQKKMGEVEFIKVNKDKHSESL
LGAKFQLQIEKDFSGYKQFVPEGSDVTTKNDGKTYFKALQDGNYKLYEIS
SPDGYIEVKTKPVVTFTIQNGEVTNLKADPNANKNQIGYLEGNGKHLITN
TPKRPPGVFPKTGGIGTIVYILVGSTFMILLTICSFRRKQL

[0938] Two E boxes containing a conserved glutamic residues have also been identified in GBS 104. The E box motifs are underlined in SEQ ID NO: 11 below. The conserved glutamic acid (E) residues, at amino acid residues 94 and 798, are marked in bold. The E box motifs, in particular the conserved glutamic acid residues, are thought to be important for the formation of oligomeric pilus-like structures of GBS 104. Preferred fragments of GBS 104 include at least one conserved glutamic acid residue. Preferably, fragments include at least one E box motif.

SEQ ID NO. 11

MKKRQKIWRGLSVTLLILSQIPFGILVQGETQDTNQALGKVIVKKTGDNA
TPLGKATFVLKNDNDKSETSHETVEGSGEATFENIKPGDYTLREETAPIG
YKKTDKTWKVKVADNGATIIEGMDADKAEKRKEVLNAQYPKSAIYEDTKE
NYPLVNVEGSKVGEQYKALNPINGKDGRREIAEGWLSKKITGVNDLDKNK
YKIELTVEGKTTVETKELNQPLDVVVLLDNSNSMNNERANNSQRALKAGE
AVEKLIDKITSNKDNRVALVTYASTIFDGTEATVSKGVADQNGKALNDSV
SWDYHKTTFTATTHNYSYLNLTNDANEVNILKSRIPKEAEHINGDRTLYQ
FGATFTQKALMKANEILETQSSNARKKLIFHVTDGVPTMSYAINFNPYIS
TSYQNQFNSFLNKIPDRSGILQEDFIINGDDYQIVKGDGESEKLFSDRKV
PVTGGTTQAAYRVPQNQLSVMSNEGYAINSGYIYLYWRDYNWVYPFDPKT
KKVSATKQIKTHGEPTTLYFNGNIRPKGYDIFTVGIGVNGDPGATPLEAE
KFMQSISSKTENYTNVDDTNKIYDELNKYFKTIVEEKHSIVDGNVTDPMG
EMIEFQLKNGQSFTHDDYVLVGNDGSQLKNGVALGGPNSDGGILKDVTVT
YDKTSQTTKINHLNLGSGQKVVLTYDVRLKDNYISNKFYNTNNRTTLSPK
SEKEPNTIRDFPIPKIRDVREFPVLTISNQKKMGEVEFIKVNKDKHSESL
LGAKFQLQIEKDFSGYKQFVPEGSDVTTKNDGKTYFKALQDGNYKLYEIS
SPDGYIEVKTKPVVTFTIQNGEVTNLKADPNANKNQIGYLEGNGKHLITN
TPKRPPGVFPKTGGIGTIVYILVGSTFMILLTICSFRRKQL

GBS 067

[0939] The following offers examples of preferred GBS 067 fragments. Nucleotide and amino acid sequence of GBS 067 sequences from serotype V isolated strain 2603 are set forth below as SEQ ID NOS: 15 and 16.

SEQ ID NO: 15

ATGAGAAAATACCAAAAATTTTCTAAAATATTGACGTTAAGTCTTTTTTG
TTTGTCGCAAATACCGCTTAATACCAATGTTTTAGGGGAAAGTACCGTAC
CGGAAAATGGTGCTAAAGGAAAGTTAGTTGTTAAAAAGACAGATGACCAG
AACAAACCACTTTCAAAAGCTACCTTTGTTTTAAAAACTACTGCTCATCC
AGAAAGTAAAATAGAAAAAGTAACTGCTGAGCTAACAGGTGAAGCTACTT
TTGATAATCTCATACCTGGAGATTATACTTTATCAGAAGAAACAGCGCCC
GAAGGTTATAAAAAGACTAACCAGACTTGGCAAGTTAAGGTTGAGAGTAA
TGGAAAAACTACGATACAAAATAGTGGTGATAAAAATTCCACAATTGGAC
AAAATCAGGAAGAACTAGATAAGCAGTATCCCCCCACAGGAATTTATGAA
GATACAAAGGAATCTTATAAACTTGAGCATGTTAAAGGTTCAGTTCCAAA
TGGAAAGTCAGAGGCAAAAGCAGTTAACCCATATTCAAGTGAAGGTGAGC
ATATAAGAGAAATTCCAGAGGGAACATTATCTAAACGTATTTCAGAAGTA
GGTGATTTAGCTCATAATAAATATAAAATTGAGTTAACTGTCAGTGGAAA
AACCATAGTAAAACCAGTGGACAAACAAAAGCCGTTAGATGTTGTCTTCG
TACTCGATAATTCTAACTCAATGAATAACGATGGCCCAAATTTTCAAAGG
CATAATAAAGCCAAGAAAGCTGCCGAAGCTCTTGGGACCGCAGTAAAAGA
TATTTTAGGAGCAAACAGTGATAATAGGGTTGCATTAGTTACCTATGGTT
CAGATATTTTTGATGGTAGGAGTGTAGATGTCGTAAAAGGATTTAAAGAA
GATGATAAATATTATGGCCTTCAAACTAAGTTCACAATTCAGACAGAGAA
TTATAGTCATAAACAATTAACAAATAATGCTGAAGAGATTATAAAAAGGA
TTCCGACAGAAGCTCCTAAAGCTAAGTGGGGATCTACTACCAATGGATTA
ACTCCAGAGCAACAAAAGGAGTACTATCTTAGTAAAGTAGGAGAAACATT
TACTATGAAAGCCTTCATGGAGGCAGATGATATTTTGAGTCAAGTAAATC
GAAATAGTCAAAAAATTATTGTTCATGTAACTGATGGTGTTCCTACGAGA
TCATATGCTATTAATAATTTTAAACTGGGTGCATCATATGAAAGCCAATT
TGAACAAATGAAAAAAAATGGATATCTAAATAAAAGTAATTTTCTACTTA
CTGATAAGCCCGAGGATATAAAAGGAAATGGGGAGAGTTACTTTTTGTTT
CCCTTAGATAGTTATCAAACACAGATAATCTCTGGAAACTTACAAAAACT
TCATTATTTAGATTTAAATCTTAATTACCCTAAAGGTACAATTTATCGAA
ATGGACCAGTGAAAGAACATGGAACACCAACCAAACTTTATATAAATAGT
TTAAAACAGAAAAATTATGACATTTTTAATTTTGGTATCGATATATCTGG
TTTTAGACAAGTTTATAATGAGGAGTATAAGAAAAATCAAGATGGTACTT
TTCAAAAATTGAAAGAGGAAGCTTTTAAACTTTCAGATGGAGAAATCACA
GAACTAATGAGGTCGTTCTCTTCCAAACCTGAGTACTACACCCCTATCGT
AACTTCAGCCGATACATCTAACAATGAAATTTTATCTAAAATTCAGCAAC
AATTTGAAACGATTTTAACAAAAGAAAACTCAATTGTTAATGGAACTATC
GAAGATCCTATGGGTGATAAAATCAATTTACAGCTTGGTAATGGACAAAC
ATTACAGCCAAGTGATTATACTTTACAGGGAAATGATGGAAGTGTAATGA
AGGATGGTATTGCAACTGGTGGGCCTAATAATGATGGTGGAATACTTAAG
GGGGTTAAATTAGAATACATCGGAAATAAACTCTATGTTAGAGGTTTGAA
TTTAGGAGAAGGTCAAAAAGTAACACTCACATATGATGTGAAACTAGATG
ACAGTTTTATAAGTAACAAATTCTATGACACTAATGGTAGAACAACATTG
AATCCTAAGTCAGAGGATCCTAATACACTTAGAGATTTTCCAATCCCTAA
AATTCGTGATGTGAGAGAATATCCTACAATAACGATTAAAAACGAGAAGA
AGTTAGGTGAAATTGAATTTATAAAAGTTGATAAAGATAATAATAAGTTG
CTTCTCAAAGGAGCTACGTTTGAACTTCAAGAATTTAATGAAGATTATAA
ACTTTATTTACCAATAAAAAATAATAATTCAAAAGTAGTGACGGGAGAAA
ACGGCAAAATTTCTTACAAAGATTTGAAAGATGGCAAATATCAGTTAATA
GAAGCAGTTTCGCCGGAGGATTATCAAAAAATTACTAATAAACCAATTTT
AACTTTTGAAGTGGTTAAAGGATCGATAAAAAATATAATAGCTGTTAATA
AACAGATTTCTGAATATCATGAGGAAGGTGACAAGCATTTAATTACCAAC
ACGCATATTCCACCAAAAGGAATTATTCCTATGACAGGTGGGAAAGGAAT
TCTATCTTTCATTTTAATAGGTGGAGCTATGATGTCTATTGCAGGTGGAA
TTTATATTTGGAAAAGGTATAAGAAATCTAGTGATATGTCCATCAAAAAA
GAT

SEQ ID NO: 16

MRKYQKFSKILTLSLFCLSQIPLNTNVLGESTVPENGAKGKLVVKKTDDQ
NKPLSKATFVLKTTAHPESKIEKVTAELTGEATFDNLIPGDYTLSEETAP
EGYKKTNQTWQVKVESNGKTTIQNSGDKNSTIGQNQEELDKQYPPTGIYE
DTKESYKLEHVKGSVPNGKSEAKAVNPYSSEGEHIREIPEGTLSKRISEV
GDLAHNKYKIELTVSGKTIVKPVDKQKPLDVVFVLDNSNSMNNDGPNFQR
HNKAKKAAEALGTAVKDILGANSDNRVALVTYGSDIFDGRSVDVVKGFKE
DDKYYGLQTKFTIQTENYSHKQLTNNAEEIIKRIPTEAPKAKWGSTTNGL
TPEQQKEYYLSKVGETFTMKAFMEADDILSQVNRNSQKIIVHVTDGVPTR
SYAINNFKLGASYESQFEQMKKNGYLNKSNFLLTDKPEDIKGNGESYFLF
PLDSYQTQIISGNLQKLHYLDLNLNYPKGTIYRNGPVKEHGTPTKLYINS
LKQKNYDIFNFGIDISGFRQVYNEEYKKNQDGTFQKLKEEAFKLSDGEIT
ELMRSFSSKPEYYTPIVTSADTSNNEILSKIQQQFETILTKENSIVNGTI
EDPMGDKTNLQLGNGQTLQPSDYTLQGNDGSVMKDGIATGGPNNDGGILK
GVKLEYIGNKLYVRGLNLGEGQKVTLTYDVKLDDSFTSNKFYDTNGRTTL
NPKSEDPNTLRDFPIPKIRDVREYPTITIKNEKKLGEIEFIKVDKDNNKL
LLKGATFELQEFNEDYRLYLPIKNNNSKVVTGENGKISYKDLKDGKYQLI
EAVSPEDYQKITNKPILTFEVVKGSIKNIIAVNKQISEYHEEGDKHLITN
THIPPKGIIPMTGGKGILSFILIGGAMMSIAGGIYIWKRYKKSSDMSIKK
D

[0940] GBS 067 contains a C-terminus transmembrane region which is indicated by the underlined region closest to the C-terminus of SEQ ID NO: 16 above. In one embodiment, one or more amino acids from the transmembrane region is removed and or the amino acid is truncated before the transmembrane region. An example of such a GBS 067 fragment is set forth below as SEQ ID NO: 17.

SEQ ID NO: 17

MRKYQKFSKILTLSLFCLSQIPLNTNVLGESTVPENGAKGKLVVKKTDDQ
NKPLSKATFVLKTTAHPESKIEKVTAELTGEATPDNLIPGDYTLSEETAP
EGYKKTNQTWQVKVESNGKTTIQNSGDKNSTIGQNQEELDKQYPPTGIYE
DTKESYKLEHVKGSVPNGKSEAKAVNPYSSEGEHIRETPEGTLSKRISEV
GDLAHNKYKTELTVSGKTIVKPVDKPKPLDVVFVLDNSNSMNNDGPNFQR
HNKAKKAAEALGTAVKDILGANSDNRVALVTYGSDIFDGRSVDVVKGFKE
DDKYYGLQTKETIQTENYSHKQLTNNAEEIIKRIPTEAPKAKWGSTTNGL
TPEQQKEYYLSKVGETFTMKAFMEADDILSQVNRNSQKIIVHVTDGVPTR
SYAINNFKLGASYESQFEQMKKNGYLNKSNFLLTDKPEDIKGNGESYFLF
PLDSYQTQIISGNLQKLHYLDLNLNYPKGTIYRNGPVKEHGTPTKLYINS
LKQKNYDIFNFGTDISGFRQVYNEEYKKNQDGTFQKLKEEAFKLSDGEIT
ELMRSESSKPEYYTPIVTSADTSNNEILSKIQQQFETILTKENSIVNGTI
EDPMGDKINLQLGNGQTLQPSDYTLQGNDGSVMKDGIATGGPNNDGGILK
GVKLEYIGNKLYVRGLNLGEGQKVTLTYDVKLDDSFISNKFYDTNGRTTL
NPKSEDPNTLRDFPIPKIRDVREYPTITIKNEKKLGEIEFIKVDKDNNKL
LLKGATFELQEFNEDYKLYLPIKNNNSKVVTGENGKISYKDLKDGKYQLI
EAVSPEDYQKITNKPILTFEVVKGSIKNIIAVNKQISEYHEEGDKHLITN
THIPPKGIIPMTGGKGILS

[0941] GBS 067 contains an amino acid motif indicative of a cell wall anchor (an LPXTG (SEQ ID NO: 122) motif): SEQ ID NO: 18 IPMTG. (shown in italics in SEQ ID NO: 16 above). In some recombinant host cell systems, it may be preferable to remove this motif to facilitate secretion of a recombinant GBS 067 protein from the host cell. Accordingly, in one preferred fragment of GBS 067 for use in the invention, the transmembrane and the cell wall anchor motif are removed from GBS 67. An example of such a GBS 067 fragment is set forth below as SEQ ID NO: 19.

SEQ ID NO: 19

MRKYQKFSKILTLSLFCLSQIPLNTNVLGESTVPENGAKGKLVVKKTDDQ
NKPLSKATFVLKTTAHPESKIEKVTAELTGEATFDNLIPGDYTLSEETAP
EGYKKTNQTWQVKVESNGKTTIQNSGDKNSTIGQNQEELDKQYPPTGIYE
DTKESYKLEHVKGSVPNGKSEAKAVNPYSSEGEHIREIPEGTLSKRTSEV
GDLAHNKYKIELTVSGKTIVKPVDKQKPLDVVFVLDNSNSMNNDGPNFQR
HNKAKKPAEALGTAVKDILGANSDNRVALVTYGSDIFDGRSVDVVKGFKE
DDKYYGLQTKFTIQTENYSHKQLTNNAEEIIKRIPTEAPKAKWGSTTNGL
TPEQQKEYYLSKVGETFTMKAFMEADDILSQVNRNSQKIIVHVTDGVPTR
SYAINNFKLGASYESQFEQMKKNGYLNKSNFLLTDKPEDIKGNGESYFLF
PLDSYQTQIISGNLQKLHYLDLNLNYPKGTIYRNGPVKEHGTPTKLYINS
LKQKNYDIFNFGIDISGERQVYNEEYKKNQDGTFQKLKEEAFKLSDGEIT
ELMRSFSSKPEYYTPIVTSADTSNNEILSKIQQQFETILTKENSIVNGTI
EDPMGDKINLQLGNGQTLQPSDYTLQGNDGSVMKDGIATGGPNNDGGILK
GVKLEYIGNKLYVRGLNLGEGQKVTLTYDVKLDDSFTSNKFYDTNGRTTL
NPKSEDPNTLRDFPIPKIRDVREYPTITIKNEKKLGEIEFIKVDKDNNKL
LLKGATFELQEFNEDYKLYLPIKNNNSKVVTGENGKISYKDLKDGKYQLI
EAVSPEDYQKITNKPILTFEVVKGSIKNIIAVNKQISEYHEEGDKHLITN
THIPPKGI

[0942] Alternatively, in some recombinant host cell systems, it may be preferable to use the cell wall anchor motif to anchor the recombinantly expressed protein to the cell wall. The extracellular domain of the expressed protein may be cleaved during purification or the recombinant protein may be left attached to either inactivated host cells or cell membranes in the final composition.

[0943] Three pilin motifs, containing conserved lysine (K) residues have been identified in GBS 67. The pilin motif sequences are underlined in SEQ ID NO: 16, below. Conserved lysine (K) residues are marked in bold, at amino acid residues 478 and 488, at amino acid residues 340 and 342, and at amino acid residues 703 and 717. The pilin sequences, in particular the conserved lysine residues, are thought to be important for the formation of oligomeric, pilus-like structures of GBS 67. Preferred fragments of GBS 67 include at least one conserved lysine residue. Preferably, fragments include at least one pilin sequence.

SEQ ID NO: 16

MRKYQKFSKILTLSLFCLSQIPLNTNVLGESTVPENGAKGKLVVKKTDDQ
NKPLSKATFVLKTTAHPESKIEKVTAELTGEATFDNLIPGDYTLSEETAP
EGYKKTNQTWQVKVESNGKTTIQNSGDKNSTIGQNQEELDKQYPPTGIYE
DTKESYKLEHVKGSVPNGKSEAKAVNPYSSEGEHIREIPEGTLSKRISEV
GDLAHNKYKIELTVSGKTIVKPVDKQKPLDVVFVLDNSNSMNNDGPNFQR
HNKAKKAAEALGTAVKDILGANSDNRVALVTYGSDIFDGRSVDVVKGFKE
DDKYYGLQTKFTIQTENYSHKQLTNNAEEIIKRIPTEAPKAKWGSTTNGL
TPEQQKEYYLSKVGETFTMKAFMEADDILSQVNRNSQKIIVHVTDGVPTR
SYAINNFKLGASYESQFEQMKKNGYLNKSNFLLTDKPEDIKGNGESYFLF
PLDSYQTQIISGNLQKLHYLDLNLNYPKGTIYRNGPVKEHGTPTKLYINS
LKQKNYDIFNFGIDISGFRQVYNEEYKKNQDGTFQKLKEEAFKLSDGEIT
ELMRSFSSKPEYYTPIVTSADTSNNEILSKIQQQFETILTKENSIVNGTI
EDPMGDKINLQLGNGQTLQPSDYTLQGNDGSVMKDGIATGGPNNDGGILK
GVKLEYIGNKLYVRGLNLGEGQKVTLTYDVKLDDSFISNKFYDTNGRTTL
NPKSEDPNTLRDFPIPKIRDVREYPTITIKNEKKLGEIEFIKVDKDNNKL
LLKGATFELQEFNEDYKLYLPIKNNNSKVVTGENGKISYKDLKDGKYQLI
EAVSPEDYQKITNKPILTFEVVKGSIKNIIAVNKQISEYHEEGDKHLITN
THIPPKGIIPMTGGKGILSFILIGGAMMSIAGGIYIWKRYKKSSDMSIKK
D

[0944] Two E boxes containing conserved glutamic residues have also been identified in GBS 67. The E box motifs are underlined in SEQ ID NO: 16 below. The conserved glutamic acid (E) residues, at amino acid residues 96 and 801, are marked in bold. The E box motifs, in particular the conserved glutamic acid residues, are thought to be important for the formation of oligomeric pilus-like structures of GBS 67. Preferred fragments of GBS 67 include at least one conserved glutamic acid residue. Preferably, fragments include at least one E box motif.

SEQ ID NO: 16

MRKYQKFSKILTLSLFCLSQIPLNTNVLGESTVPENGAKGKLVVKKTDDQ
NKPLSKATFVLKTTAHPESKIEKVTAELTGEARFDNLIPGDYTLSEETAP
EGYKKTNQTWQVKVESNGKTTIQNSGDKNSTIGQNQEELDKQYPPTGIYE
DTKESYKLEHVKGSVPNGKSEAKAVNPYSSEGEHIREIPEGTLSKRISEV
GDLAHNKYKIELTVSGKTIVKPVDKQKPLDVVFVLDNSNSMNNDGPNFQR
HNKAKKAAEALGTAVKDILGANSDNRVALVTYGSDIFDGRSVDVVKGFKE
DDKYYGLQTKFTIQTENYSHKQLTNNAEEIIKRIPTEAPKAKWGSTTNGL
TPEQQKEYYLSKVGETFTMKAFMEADDILSQVNRNSQKIIVHVTDGVPTR
SYAINNFKLGASYESQFEQMKKNGYLNKSNFLLTDKPEDIKGNGESYFLF
PLDSYQTQIISGNLQKLHYLDLNLNYPKGTIYRNGPVKEHGTPTKLYINS
LKQKNYDIFNFGIDISGFRQVYNEEYKKNQDGTFQKLKEEAFKLSDGEIT
ELMRSFSSKPEYYTPIVTSADTSNNEILSKIQQQFETILTKENSIVNGTI
EDPMGDKINLQLGNGQTLQPSDYTLQGNDGSVMKDGIATGGPNNDGGILK
GVKLEYIGNKLYVRGLNLGEGQKVTLTYDVKLDDSFISNKFYDTNGRTTL
NPKSEDPNTLRDFPIPKIRDVREYPTITIKNEKKLGEIEFIKVDKDNNKL
LLKGATFELQEFNEDYKLYLPIKNNNSKVVTGENGKISYKDLKDGKYQLI
EAVSPEDYQKITNKPILTFEVVKGSIKNIIAVNKQISEYHEEGDKHLITN
THIPPKGIIPMTGGKGILSFILIGGAMMSIAGGIYIWKRYKKSSDMSIKK
D

[0945] Predicted secondary structure for the GBS 067 amino acid sequence is set forth in FIG. 33. As shown in this figure, GBS 067 contains several regions predicted to form alpha helical structures. Such alpha helical regions are likely to form coiled-coil structures and may be involved in oligomerization of GBS 067.

[0946] The amino acid sequence for GBS 067 also contains a region which is homologous to the Cna_B domain of the Staphylococcus aureus collagen-binding surface protein (pfam05738). Although the Cna_B region is not thought to mediate collagen binding, it is predicted to form a beta sandwich structure. In the Staph aureus protein, this beta sandwich structure is through to form a stalk that presents the ligand binding domain away from the bacterial cell surface. This same amino acid sequence region is also predicted to be an outer membrane protein involved in cell envelope biogenesis.

[0947] The amino acid sequence for GBS 067 contains a region which is homologous to a von Willebrand factor (vWF) type A domain. The vWF type A domain is present at amino acid residues 229-402 of GBS 067 as shown in SEQ ID NO: 16. This type of sequence is typically found in extracellular proteins such as integrins and it thought to mediate adhesion, including adhesion to collagen, fibronectin, and fibrinogen, discussed above.

[0948] Because applicants have identified GBS 67 as a surface exposed protein on GBS and because GBS 67 may be involved in GBS adhesion, the immunogenicity of the GBS 67 protein was examined in mice. The results of an immunization assay with GBS 67 are set forth in Table 48, below.

TABLE 48
GBS 67 Protects Mice in an Immunization Assay

| Challenge | GBS 67 immungen | | | | |
|---|---|---|---|---|---|
| GBS strain | dead/ | | PBS immunogen | | FACS |
| (serotype) | treated | % survival | dead/treated | % survival | Δmean |
| 3050 (II) | 0/30 | 100 | 29/49 | 41 | 460 |
| CJB111 (V) | 76/185 | 59 | 143/189 | 24 | 481 |
| 7357 b (Ib) | 34/56 | 39 | 65/74 | 12 | 316 |

[0949] As shown in Table 48, immunization with GBS 67 provides a substantially improved survival rate for challenged mice relative to negative control, PBS, immunized mice. These results indicate that GBS 67 may comprise an immunogenic composition of the invention.

GBS 59

[0950] The following offers examples of GBS 59 fragments. Nucleotide and amino acid sequences of GBS 59 sequenced from serotype V isolated strain 2603 are set forth below as SEQ ID NOS: 125 and 126. The GBS 59 polypeptide of SEQ ID NO: 126 is referred to as SAG1407.

SEQ ID NO: 125

ttaagcttcctttgattggcgtcttttcatgataactactgctccaagca
taatgcttaaaccaataattgtgaaaagaattgtaccaataccacctgtt
tgtgggattgttacctttttattttctacacgtgtcgcatctttttggtt
gctgttagcaacgtagtcaatgttaccacctgttatgtatgacccttgat
taactacaaacttaatattacctgccaacttagcaaatcctgctggagca
agtgtttcttcaaggttgtaagtaccgtctgcaagacctgtaacttcaaa
ttgaccttgatcgtttgaagtgtaggtaatggctctagccttatctgtta
tccactcataagctgtacgagcctcaatgaaggctgcatcgtaatctgct
tgtttagttttgataagttcttttgcagtaattcctttttcacctttttg
gtctgttgcagacaacttgttataagcagcgatagcttcatctaaagcta
ttttcttagcagctaaagttttttgaccttctgattgatctgctttaaga
gcaaggtatttacctgctgagtttttcacaacgaattgtgcaccagccaa
acggtcaccttgttcattagttttgacaaatttcttaccatgagtttcaa
cttttggttcagttgggttcaatggtgttgggttatcagaatctttggta
ttggtaatggttactttaccattttctagatttattgcacttccgtaacc
agaaacacgttctgagatcatgtatgatttgttttctagaccagtgaatt
tacccgagaagttaccagatacttcaaatttgataccatttccaaggtcg
attgtacctttagatgtttttgtcaatgatactgaagcaacagttttatc
tttatctttcaatgtgtaaacaacgtttacaccatcaggtgcaattccgt
cagaccaagttttagcaactgttacttcaccctttgaaggtgtaacagga
agttcagtcaagtctttacctggtttgttaccatacgacaatttgatatc
attggattctggattatcaataattgcttgaccattaacagtagcactat
aagtcaatgtaaattcaatatcagctgttttagctgctttttccaatttg
cccaatccatcagctgtgaattttaatgtgaaaccacgggcatcaatgct
aagttcatagtctgtatccttagcaaaagtttctgtagttcctgaagctt
taaggctaacagttgaacccattgtcaaaccatttgacattatatctgtc
caaaccaagttttcgtatttagaacctttgtgaatttttgttttaacttc
ataaggaacaactttaccgatttcagcagtagcagttgctttgtcacgtg
cataattaccataatttgcgccagctgtcaaaagtctattaacatctgtc
aatgctgtcaaatcgtttgttttagcaaagtttttatcaatttctggttt
ttcttcagtgttctttggataaacatgggcatcagcaacaacaccatctt
catttaccaatggaagagtgatgttaactggaaccgcttttgaagcagcc
aggagggaaccattattgttgtaagtagattttgatttaacttcaacaat
tttaaactcgcctttcaatcctttggtgttgaaaacaagtccagtatctc
cctctggtgtcaatccagacacggcctcatcaatatttactgttatttca
ggagtaccatctttattaattaaggctggtgttaatttgttaccttcttt
tgccttaacatattgcactttaccacttttatcttctttcaaagctaaag
caaagaacgcaccttcgatttctttagatccctcgccaaagtaaccagca
aggtcagaaatagctccacctttgtagtcttttccgttaagacctgtagt
tcctgggaagttacttttgttaagatttgattcggtttgcaaaatcttgt
gcaaagtcactgtattagttgttgcttcatccgcaaacgctggtgcaact
gagagcaatgacgttaaagtcagtaacaatgccgagaacattgcaaaata
tttgttgattcttttcat

SEQ ID NO: 126

MKRINKYFAMFSALLLTLTSLLSVAPAFADEATTNTVTLHKILQTESNLN
KSNFPGTTGLNGKDYKGGAISDLAGYFGEGSKEIEGAFFALALKEDKSGK
VQYVKAKEGNKLTPALINKDGTPEITVNIDEAVSGLTPEGDTGLVFNTKG
LKGEFKIVEVKSKSTYNNNGSLLAASKAVPVNITLPLVNEDGVVADAHVY
PKNTEEKPEIDKNFAKTNDLTALTDVNRLLTAGANYGNYARDKATATAEI
GKVVPYEVKTKIHKGSKYENLVWTDIMSNGLTMGSTVSLKASGTTETFAK
DTDYELSIDARGFTLKFTADGLGKLEKAAKTADIEFTLTYSATVNGQAII
DNPESNDIKLSYGNKPGKDLTELPVTPSKGEVTVAKTWSDGIAPDGVNVV
YTLKDKDKTVASVSLTKTSKGTIDLGNGIKPEVSGNFSGKETGLENKSYM
ISERVSGYGSAINLENGKVTITNTKDSDNPTPLNPTEPKVETHGKKFVKT
NEQGDRLAGAQFVVKNSAGKYLALKADQSEGQKTLAAKKIALDEAIAAYN
KLSATDQKGEKGITAKELIKTKQADYDAAFIEARTAYEWITDKARAITYT
SNDQGQFEVTGLADGTYNLEETLAPAGFAKLAGNIKFVVNQGSYITGGNI
DYVANSNQKDATRVENKKVTIPQTGGIGTILFTIIGLSIMLGAVVIMKRR
QSKEA

[0951] Nucleotide and amino acid sequences of GBS 59 sequenced from serotype V isolated strain CJB111 are set forth below as SEQ ID NOS: 127 and 128. The GBS 59 polypeptide of SEQ ID NO: 128 is referred to as BO1575.

SEQ ID NO: 127

ATGAAAAAAATCAACAAATGTCTTACAATGTTCTCGACACTGCTATTGAT
CTTAACGTCACTATTCTCAGTTGCACCAGCGTTTGCGGACGACGCAACAA
CTGATACTGTGACCTTGCACAAGATTGTCATGCCACAAGCTGCATTTGAT
AACTTTACTGAAGGTACAAAAGGTAAGAATGATAGCGATTATGTTGGTAA
ACAAATTAATGACCTTAAATCTTATTTTGGCTCAACCGATGCTAAAGAAA
TCAAGGGTGCTTTCTTTGTTTTCAAAAATGAAACTGGTACAAAATTCATT
ACTGAAAATGGTAAGGAAGTCGATACTTTGGAAGCTAAAGATGCTGAAGG
TGGTGCTGTTCTTTCAGGGTTAACAAAAGACAATGGTTTTGTTTTTAACA
CTGCTAAGTTAAAAGGAATTTACCAAATCGTTGAATTGAAAGAAAAATCA
AACTACGATAACAACGGTTCTATCTTGGCTGATTCAAAAGCAGTTCCAGT
TAAAATCACTCTGCCATTGGTAAACAACCAAGGTGTTGTTAAAGATGCTC
ACATTTATCCAAAGAATACTGAAACAAAACCACAAGTAGATAAGAACTTT
GCAGATAAAGATCTTGATTATACTGACAACCGAAAAGACAAAGGTGTTGT
CTCAGCGACAGTTGGTGACAAAAAAGAATACATAGTTGGAACAAAAATTC
TTAAAGGCTCAGACTATAAGAAACTGGTTTGGACTGATAGCATGACTAAA
GGTTTGACGTTCAACAACAACGTTAAAGTAACATTGGATGGTGAAGATTT
TCCTGTTTTAAACTACAAACTCGTAACAGATGACCAAGGTTTCCGTCTTG
CCTTGAATGCAACAGGTCTTGCAGCAGTAGCAGCAGCTGCAAAAGACAAA
GATGTTGAAATCAAGATCACTTACTCAGCTACGGTGAACGGCTCCACTAC
TGTTGAAATTCCAGAAACCAATGATGTTAAATTGGACTATGGTAATAACC
CAACGGAAGAAAGTGAACCACAAGAAGGTACTCCAGCTAACCAAGAAATT
AAAGTCATTAAAGACTGGGCAGTAGATGGTACAATTACTGATGCTAATGT
TGCAGTTAAAGCTATCTTTACCTTGCAAGAAAAACAAACGGATGGTACAT
GGGTGAACGTTGCTTCACACGAAGCAACAAAACCATCACGCTTTGAACAT
ACTTTCACAGGTTTGGATAATGCTAAAACTTACCGCGTTGTCGAACGTGT
TAGCGGCTACACTCCAGAATACGTATCATTTAAAAATGGTGTTGTGACTA
TCAAGAACAACAAAAACTCAAATGATCCAACTCCAATCAACCCATCAGAA
CCAAAAGTGGTGACTTATGGACGTAAATTTGTGAAAACAAATCAAGCTAA
CACTGAACGCTTGGCAGGAGCTACCTTCCTCGTTAAGAAAGAAGGCAAAT
ACTTGGCACGTAAAGCAGGTGCAGCAACTGCTGAAGCAAAGGCAGCTGTA
AAAACTGCTAAACTAGCATTGGATGAAGCTGTTAAAGCTTATAACGACTT
GACTAAAGAAAAACAAGAAGGCCAAGAAGGTAAAACAGCATTGGCTACTG
TTGATCAAAAACAAAAAGCTTACAATGACGCTTTTGTTAAAGCTAACTAC
TCATATGAATGGGTTGCAGATAAAAAGGCTGATAATGTTGTTAAATTGAT
CTCTAACGCCGGTGGTCAATTTGAAATTACTGGTTTGGATAAAGGCACTT
ATGGCTTGGAAGAAACTCAAGCACCAGCAGGTTATGCGACATTGTCAGGT
GATGTAAACTTTGAAGTAACTGCCACATCATATAGCAAAGGGGCTACAAC
TGACATCGCATATGATAAAGGCTCTGTAAAAAAAGATGCCCAAGAAGTTC
AAAACAAAAAAGTAACCATCCCACAAACAGGTGGTATTGGTACAATTCTT
TTCACAATTATTGGTTTAAGCATTATGCTTGGAGCAGTAGTTATCATGAA
AAAACGTCAATCAGAGGAAGCTTAA

SEQ ID NO: 128

MKKINKCLTMFSTLLLILTSLFSVAPAFADDATTDTVTLHKIVMPQAAFD
NFTEGTKGKNDSDYVGKQINDLKSYFGSTDAKEIKGAFFVFKNETGTKFI
TENGKEVDTLEAKDAEGGAVLSGLTKDNGFVFNTAKLKGIYQIVELKEKS
NYDNNGSILADSKAVPVKITLPLVNNQGVVKDAHIYPKNTETKPQVDKNF
ADKDLDYTDNRKDKGVVSATVGDKKEYIVGTKILKGSDYKKLVWTDSMTK
GLTFNNNVKVTLDGEDFPVLNYKLVTDDQGFRLALNATGLAAVAAAAKDK
DVEIKITYSATVNGSTTVEIPETNDVKLDYGNNPTEESEPQEGTPANQEI
KVIKDWAVDGTITDANVAVKAIFTLQEKQTDGTWVNVASHEATKPSRFEH
TFTGLDNAKTYRVVERVSGYTPEYVSFKNGVVTIKNNKNSNDPTPINPSE
PKVVTYGRKFVKTNQANTERLAGATFLVKKEGKYLARKAGAATAEAKAAV
KTAKLALDEAVKAYNDLTKEKQEGQEGKTALATVDQKQKAYNDAFVKANY
SYEWVADKKADNVVKLISNAGGQFEITGLDKGTYGLEETQAPAGYATLSG
DVNFEVTATSYSKGATTDIAYDKGSVKKDAQQVQNKKVTIPQTGGIGTIL
FTIIGLSIMLGAVVIMKKRQSEEA

[0952] The GBS 59 polypeptides contain an amino acid motif indicative of a cell wall anchor: SEQ ID NO: 129 IPQTG (shown in italics in SEQ ID NOs: 126 and 128 above). In some recombinant host cell systems, it may be preferable to remove this motif to facilitate secretion of a recombinant GBS 59 protein from the host cell. Alternatively, in some recombinant host cell systems, it may be preferable to use the cell wall anchor motif to anchor the recombinantly expressed protein to the cell wall. The extracellular domain of the expressed protein may be cleaved during purification or the recombinant protein may be left attached to either inactivated host cells or cell membranes in the final composition.

[0953] Pilin motifs, containing conserved lysine (K) residues have been identified in the GBS 59 polypeptides. The pilin motif sequences are underlined in each of SEQ ID NOs: 126 and 128, below. Conserved lysine (K) residues are marked in bold. The conserved lysine (K) residues are located at amino acid residues 202 and 212 and amino acid residues 489 and 495 of SEQ ID NO: 126 and at amino acid residues 188 and 198 of SEQ ID NO: 128. The pilin sequences, in particular the conserved lysine residues, are thought to be important for the formation of oligomeric, pilus-like structures of GBS 59. Preferred fragments of GBS 59 include at least one conserved lysine residue. Preferably, fragments include at least one pilin sequence.

SEQ ID NO: 126

MKRINKYFAMFSALLLTLTSLLSVAPAFADEATTNTVTLHKILQTESNLN
KSNFPGTTGLNGKDYKGGATSDLAGYFGEGSKSIEGAFFALALKEDKSGK
VQYVKAKEGNKLTPALINKDGTPEITVNIDEAVSGLTPEGDTGLVFNTKG
LKGEFKIVEVKSKSTYNNNGSLLAASKAVPVNITLPLVNEDGVVADAHVY
PKNTEEKPEIDKNFAKTNDLTALTDVNRLLTAGANYGNYARDKATATAET
GKVVPYEVKTKIHKGSKYENLVWTDIMSNGLTMGSTVSLKASGTTETFAK
DTDYELSIDARGFTLKFTADGLGKLEKAAKTADIEFTLTYSATVNGQAII
DNPESNDIKLSYGNKPGKDLTELPVTPSKGEVTVAKTWSDGIAPDGVNVV
YTLKDKDKTVASVSLTKTSKGTIDLGNGIKEEVSGNFSGKFTGLENKSYM
ISERVSGYGSAINLENGKVTITNTKDSDNPTPLNPTEPKVETHGKKFVKT
NEQGDRLAGAQFVVKNSAGKYLALKADQSEGQKTLAAKKIALDEAIAAYN
KLSATDQKGEKGITAKELIKTKQADYDAAFIEARTAYEWITDKARAITYT
SNDQGQFEVTGLADGTYNLEETLAPAGFAKLAGNIKFVVNQGSYITGGNI
DYVANSNQKDATRVENKKVTIPQTGGIGTILFTIIGLSIMLGAVVIMKRR
QSKEA

SEQ ID NO: 128

MKKINKCLTMFSTLLLILTSLFSVAPAFADDATTDTVTLHKIVMPQPAFD
NFTEGTKGKNDSDYVGKQINDLKSYFGSTDAKEIKGAFFVFKNETGTKFI
TENGKEVDTLEAKDAEGGAVLSGLTKDNGFVFNTAKLKGIYQIVELKEKS
NYDNNGSILADSKAVPVKITLPLVNNQGVVKDAHIYPKNTETKPQVDKNF
ADKDLDYTDNRKDKGVVSATVGDKKEYIVGTKILKGSDYKKLVWTDSMTK
GLTFNNNVKVTLDGEDFPVLNYKLVTDDQGFRLALNATGLAAVAAAAKDK
DVEIKITYSATVNGSTTVEIPETNDVKLDYGNNPTEESEPQEGTPANQEI
KVIKDWAVDGTITDANVAVKAIFTLQEKQTDGTWVNVASHEATKPSRFEH
TFTGLDNAKTYRVVERVSGYTPEYVSFKNGVVTIKNNKNSNDPTPINPSE
PKVVTYGRKFVKTNQANTERLAGATFLVKKEGKYLARKAGAATAEAKAAV
KTAKLALDEAVKAYNDLTKEKQEGQEGKTALATVDQKQKAYNDAFVKANY
SYEWVADKKADNVVKLISNAGGQFEITGLDKGTYGLEETQAPAGYATLSG
DVNFEVTATSYSKGATTDIAYDKGSVKKDAQQVQNKKVTIPQTGGIGTIL
FTIIGLSIMLGAVVIMKKRQSEEA

[0954] An E box containing a conserved glutamic residue has also been identified in each of the GBS 59 polypeptides. The E box motif is underlined in each of SEQ ID NOs: 126 and 128 below. The conserved glutamic acid (E) is marked in bold at amino acid residue 621 in SEQ ID NO: 126 and at amino acid residue 588 in SEQ ID NO: 128. The E box motif, in particular the conserved glutamic acid residue, is thought to be important for the formation of oligomeric pilus-like structures of GBS 59. Preferred fragments of GBS 59 include the conserved glutamic acid residue. Preferably, fragments include the E box motif.

SEQ ID NO: 126

MKRINKYFAMFSALLLTLTSLLSVAPAFADEATTNTVTLHKILQTESNLN
KSNFPGTTGLNGKDYKGGAISDLAGYFGEGSKEIEGAFFALALKEDKSGK
VQYVKAKEGNKLTPALINKDGTPEITVNIDEAVSGLTPEGDTGLVFNTKG
LKGEFKIVEVKSKSTYNNNGSLLAASKAVPVNITLPLVNEDGVVADAHVY
PKNTEEKPEIDKNFAKTNDLTALTDVNRLLTAGANYGNYARDKATATAEI
GKVVPYEVKTKIHKGSKYENLVWTDIMSNGLTMGSTVSLKASGTTETFAK
DTDYELSIDARGFTLKFTADGLGKLEKAAKTADIEFTLTYSATVNGQAII
DNPESNDIKLSYGNKPGKDLTELPVTPSKGEVTVAKTWSDGIAPDGVNVV
YTLKDKDKTVASVSLTKTSKGTIDLGNGIKFEVSGNFSGKFTGLENKSYM
ISERVSGYGSAINLENGKVTITNTKDSDNPTPLNPTEPKVETHGKKEVKT
NEQGDRLAGAQFVVKNSAGKYLALKADQSEGQKTLAAKKIALDEAIAAYN
KLSATDQKGEKGITAKELIKTKQADYDAAFIEARTAYEWITDKARAITYT
SNDQGQFEVTGLADGTYNLEETLAPAGFAKLAGNIKEVVNQGSYITGGNI
DYVANSNQKDATRVENKKVTIPQTGGIGTILFTIIGLSIMLGAVVIMKRR
QSKEA

SEQ ID NO: 128

MKKINKCLTMFSTLLLILTSLFSVAPAFADDATTDTVTLHKIVMPQAAFD
NFTEGTKGKNDSDYVGKQINDLKSYFGSTDAKEIKGAFFVFKNETGTKFI
TENGKEVDTLEAKDAEGGAVLSGLTKDNGFVFNTAKLKGIYQIVELKEKS
NYDNNGSILADSKAVPVKITLPLVNNQGVVKDAHIYPKNTETKPQVDKNF
ADKDLDYTDNRKDKGVVSATVGDKKEYTVGTKILKGSDYKKLVWTDSMTK
GLTFNNNVKVTLDGEDFPVLNYKLVTDDQGFRLALNATGLAAVAAAAKDK
DVEIKITYSATVNGSTTVEIPETNDVKLDYGNNPTEESEPQEGTPANQEI
KVIKDWAVDGTITDANVAVKAIFTLQEKQTDGTWVNVASHEATKPSRFEH
TFTGLDNAKTYRVVERVSGYTPEYVSFKNGVVTIKNNKNSNDPTPINPSE
PKVVTYGRKFVKTNQANTERLAGATFLVKKEGKYLARKAGAATAEAKAAV
KTAKLALDEAVKAYNDLTKEKQEGQEGKTALATVDQKQKAYNDAFVKANY
SYEWVADKKADNVVKLISNAGGQFEITGLDKGTYGLEETQAPAGYATLSG
DVNFEVTATSYSKGATTDIAYDKGSVKKKAQQVQNKKVTIPQTGGIGTIL
FTIIGLSIMLGAVVIMKKRQSEEA

[0955] Female mice were immunized with either SAG1407 (SEQ ID NO: 126) or BO1575 (SEQ ID NO: 128) in an active maternal immunization assay. Pups bred from the immunized female mice survived GBS challenge better than control (PBS) treated mice. Results of the active maternal immunization assay using the GBS 59 immunogenic compositions are shown in Table 17, below.

TABLE 17
Active maternal immunization assay for GBS 59

| Challenge | GBS 59 | | PBS | | |
|---|---|---|---|---|---|
| GBS strain | | Survival | | Survival | |
| (serotype) | Dead/treated | (%) | Dead/treated | (%) | FACS |
| CJB111 (V)* | 7/20 | 65 | 41/49 | 16 | 493 |
| 18RS21 (II)** | 18/30 | 40 | 39/40 | 2.5 | 380 |

*immunized with BO1575
**immunized with SAG1407

[0956] Opsonophagocytosis assays also demonstrated that antibodies against BO 1575 are opsonic for GBS serotype V, strain CJB111. See FIG. 67.

GBS 52

[0957] Examples of polynucleotide and amino acid sequences for GBS 52 are set forth below. SEQ ID NO: 20 and 21 represent GBS 52 sequences from GBS serotype V, strain isolate 2603.

SEQ ID NO: 20

ATGAAACAAACATTAAAACTTATGTTTTCTTTTCTGTTGATGTTAGGGAC
TATGTTTGGAATTAGCCAAACTGTTTTAGCGCAAGAAACTCATCAGTTGA
CGATTGTTGATCTTGAAGCAAGGGATATTGATCGTCCAAATCCACAGTTG
GAGATTGCCCCTAAAGAAGGGACTCCAATTGAAGGAGTACTCTATCAGTT
GTACCAATTAAAATCAACTGAAGATGGGGATTTGTTGGCAGATTGGAATT
CCCTAACTATCACAGAATTGAAAAAACAGGCGCAGCAGGTTTTTGAAGCG
ACTACTAATCAACAAGGAAAGGCTACATTTAACCAACTACCAGATGGAAT
TTATTATGGTCTGGCGGTTAAAGCCGGTGAAAAAAATCGTAATGTCTCAG
CTTTCTTGGTTGACTTGTCTGAGGATAAAGTGATTTATCCTAAAATCATC
TGGTCCACAGGTGAGTTGGACTTGCTTAAAGTTGGTGTGGATGGTGATAC
CAAAAAACCACTAGCAGGCGTTGTCTTTGAACTTTATGAAAAGAATGGTA
GGACTCCTATTCGTGTGAAAAATGGGGTGCATTCTCAAGATATTGACGCT
GCAAAACATTTAGAAACAGATTCATCAGGGCATATCAGAATTTCCGGGCT
CATCCATGGGGACTATGTCTTAAAAGAAATCGAGACACAGTCAGGATATC
AGATCGGACAGGCAGAGACTGCTGTGACTATTGAAAAATCAAAAACAGTA
ACAGTAACGATTGAAAATAAAAAAGTTCCGACACCTAAAGTGCCATCTCG
AGGAGGTCTTATTCCCAAAACAGGTGAGCAACAGGCAATGGCACTTGTAA
TTATTGGTGGTATTTTAATTGCTTTAGCCTTACGATTACTATCAAAACAT
CGGAAACATCAAAATAAGGAT

SEQ ID NO: 21

MKQTLKLMFSFLLMLGTMFGISQTVLAQETHQLTIVHLEARDIDRPNPQL
EIAPKEGTPIEGVLYQLYQLKSTEDGDLLAHWNSLTITELKKQAQQVFEA
TTNQQGKATFNQLPDGIYYGLAVKAGEKNRNVSAFLVDLSEDKVIYPKII
WSTGELDLLKVGVDGDTKKPLAGVVFELYEKNGRTPTRVKNGVHSQDIDA
AKHLETDSSGHIRISGLIHGDYVLKEIETQSGYQIGQAETAVTIEKSKTV
TVTIENKKVPTPKVPSRGGLIPKTGEQQAMALVIIGGILIALALRLLSKH
RKHQNKD

[0958] GBS 52 contains an amino acid motif indicative of a cell wall anchor: SEQ ID NO: 124 IPKTG (shown in italics in SEQ ID NO: 21, above). In some recombinant host cell systems, it may be preferable to remove this motif to facilitate secretion of a recombinant GBS 52 protein from the host cell. Alternatively, in other recombinant host cell systems, it may be preferable to use the cell wall anchor motif to anchor the recombinantly expressed protein to the cell wall. The extracellular domain of the expressed protein may be cleaved during purification or the recombinant protein may be left attached to either inactivated host cells or cell membranes in the final composition.

[0959] A pilin motif, discussed above, containing a conserved lysine (K) residue has also been identified in GBS 52. The pilin motif sequence is underlined in SEQ ID NO: 21, below. Conserved lysine (K) residues are also marked in bold, at amino acid residues 148 and 160. The pilin sequence, in particular the conserved lysine residues, are thought to be important for the formation of oligomeric, pilus-like structures. Preferred fragments of GBS 52 include at least one conserved lysine residue. Preferably, fragments include the pilin sequence.

SEQ ID NO: 21

MKQTLKLMFSFLLMLGTMFGISQTVLAQETHQLTIVHLEARDIDRPNPQL
EIAPKEGTPIEGVLYQLYQLKSTEDGDLLAHWNSLTITELKKQAQQVFEA
TTNQQGKATFNQLPDGIYYGLAVKAGEKNRNVSAFLVDLSEDKVIYPKII
WSTGELDLLKVGVDGDTKKPLAGVVFELYEKNGRTPTRVKNGVHSQDIDA
AKHLETDSSGHIRISGLIHGDYVLKEIETQSGYQIGQAETAVTIEKSKTV
TVTIENKKVPTPKVPSRGGLIPKTGEQQAMALVIIGGILIALALRLLSKH
RKHQNKD

[0960] An E box containing a conserved glutamic residue has been identified in GBS 52. The E-box motif is underlined in SEQ ID NO: 21, below. The conserved glutamic acid (E), at amino acid residue 226, is marked in bold. The E box motif, in particular the conserved glutamic acid residue, is thought to be important for the formation of oligomeric pilus-like structures of GBS 52. Preferred fragments of GBS 52 include the conserved glutamic acid residue. Preferably, fragments include the E box motif.

SEQ ID NO: 21

MKQTLKLMFSFLLMLGTMFGISQTVLAQETHQLTIVHLEARDIDRPNPQL
EIAPKEGTPIEGVLYQLYQLKSTEDGDLLAHWNSLTITELKKQAQQVFEA
TTNQQGKATFNQLPDGIYYGLAVKAGEKNRNVSAFLVDLSEDKVIYPKII
WSTGELDLLKVGVDGDTKKPLAGVVFELYEKNGRTPTRVKNGVHSQDIDA
AKHLETDSSGHIRISGLIHGDYVLKEIETQSGYQIGQAETAVTIEKSKTV
TVTIENKKVPTPKVPSRGGLIPKTGEQQAMALVIIGGILIALALRLLSKH
RKHQNKD

SAG0647

[0961] Examples of polynucleotide and amino acid sequences for SAG0647 are set forth below. SEQ ID NO: 22 and 23 represent SAG0647 sequences from GBS serotype V, strain isolate 2603.

SEQ ID NO: 22

ATGGGACAAAAATCAAAAATATCTCTAGCTACGAATATTCGTATATGGAT
TTTTCGTTTAATTTTCTTAGCGGGTTTCCTTGTTTTGGCATTTCCCATCG
TTAGTCAGGTCATGTACTTTCAAGCCTCTCACGCCAATATTAATGCTTTT
AAAGAAGGTGTTACCAAGATTGACCGGGTGGAGATTAATCGGCGTTTAGA
ACTTGCTTATGCTTATAAGGCCAGTATAGCAGGTGCCAAAACTAATGGCG
AATATCCAGCGCTTAAAGACCCCTACTCTGGTGAACAAAAGCAGGCAGGG
GTCGTTGAGTACGCCCGCATGCTTGAAGTCAAAGAACAAATAGGTCATGT
GATTATTCCAAGAATTAATCAGGATATCCCTATTTACGCTGGCTCTGCTG
AAGAAAATCTTCAGAGGGGCGTTGGACATTTAGAGGGGACCAGTCTTCCA
GTCGGTGGTGAGTCAACTCATGCCGTTGTAACTGCCCATCGAGGGCTACC
AACGGCCAAGCTATTTACGAATTTAGACAAGGTAACAGTAGGTGACCGTT
TTTACATTGAAGACATCGGCGGAAAGATTGCTTATCAGGTAGACCAAATC
AAAGTTATCGGCCCTGATCAGTTAGAGGATTTGTACGTGATTCAAGGAGA
AGATCACGTCACCCTATTAACTTGCACAGCTTATATGATAAATAGTCATC
GCCTCCTCGTTCGAGGCAAGCGAATTCCTTATGTGGAAAAAACAGTGCAG
AAAGATTCAAAGACCTTCAGGCAACAACAATACCTAACCTATGCTATGTG
GGTAGTCGTTGGACTTATGTTGCTGTCGCTTCTCATTTGGTTTAAAAAGA
CGAAACAGAAAAAGCGGAGAAAGAATGAAAAAGCGGCTAGTCAAAATAGT
CACAATAATTCGAAATAA

SEQ ID NO: 23

MGQKSKISLATNIRIWIERLIFLAGFLVLAFPIVSQVMYFQASHANINAF
KEAVTKIDRVEINRRLELAYAYNASIAGAKTNGEYPALKDPYSAEQKQAG
VVEYARMLEVKEQIGHVIIPRINQDIPIYAGSAEENLQRGVGHLEGTSLP
VGGESTHAVLTAHRGLPTAKLFTNLDKVTVGDRFYIEHIGGKIAYQVDQI
KVIAPDQLEDLYVIQGEDHVTLLTCTPYMINSHRLLVRGKRIPYVEKTVQ
KDSKTFRQQQYLTYAMWVVVGLILLSLLIWFKKTKQKKRRKNEKAASQNS
HNNSK

SAG0648

[0962] Examples of polynucleotide and amino acid sequences for SAG0648 are set forth below. SEQ ID NO: 24 and 25 represent SAG0648 sequences from GBS serotype V, strain isolate 2603.

SEQ ID NO: 24

ATGGGAAGTCTGATTCTCTTATTTCCGATTGTGAGCCAGGTAAGTTACTA
CCTTGCTTCGCATCAAAATATTAATCAATTTAAGCGGGAAGTCGCTAAGA
TTGATACTAATACGGTTGAACGACGCATCGCTTTAGCTAATGCTTACAAT
GAGACGTTATCAAGGAATCCCTTGCTTATAGACCCTTTTACCAGTAAGCA
AAAAGAAGGTTTGAGAGAGTATGCTCGTATGCTTGAAGTTCATGAGCAAA
TAGGTCATGTGGCAATCCCAAGTATTGGGGTTGATATTCCAATTTATGCT
GGAACATCCGAAACTGTGCTTCAGAAAGGTAGTGGGCATTTGGAGGGAAC
CAGTCTTCCAGTGGGAGGTTTGTCAACCCATTCAGTACTAACTGCCCACC
GTGGCTTGCCAACAGCTAGGCTATTTACCGACTTAAATAAAGTTAAAAAA
GGCCAGATTTTCTATGTGACGAACATCAAGGAAACACTTGCCTACAAAGT
CGTGTCTATCAAAGTTGTGGATCCAACAGCTTTAAGTGAGGTTAAGATTG
TCAATGGTAAGGATTATATAACCTTGCTGACTTGCACACCTTACATGATC
AATAGTCATGGTCTCTTGGTAAAAGGAGAGCGTATTCCTTATGATTCTAC
CGAGGCGGAAAAGCACAAAGAACAAACGGTACAAGATTATCGTTTGTCAC
TAGTGTTGAAGATACTACTAGTATTATTAATTGGACTCTTCATCGTGATA
ATGATGAGAAGATGGATGGAACATCGTCAATAA

SEQ ID NO: 25

MGSLILLFPIVSQVSYYLASHQNINQFKREVAKIDTNTVERRIALANAYN
ETLSRNPLLIDPFTSKQKEGLREYARMLEVHEQTGHVATPSIGVDIPIYA
GTSETVLQKGSGHLEGTSLPVGGLSTHSVLTAHRGLPTARLFTDLNKVKK
GQIFYVTNIKETLAYKVVSIKVVDPTALSEVKIVNGKDYITLLTCTPYMI
NSHRLLVKGERIPYDSTEAEKHKEQTVQDYRLSLVLKILLVLLIGLFIVI
MMRRWMQHRQ

GBS 150

[0963] Examples of polynucleotide and amino acid sequences for GBS 150 are set forth below. SEQ ID NO: 26 and 27 represent GBS 150 sequences from GBS serotype V, strain isolate 2603.

SEQ ID NO: 26

ATGAAAAAGATTAGAAAAAGTTTAGGACTTCTAGTATGTTGGTTTTTAGG
ATTGGTACAATTAGCGTTTTTTTCGGTAGGCAGTGTAAATGCTGATACCC
CTAATCAACTAACAATCACAGAGATAGGACTTCAGCGAAATACTACAGAG
GAGGGGATTTCTTATGGTTTATGGACTGTGACTGACAAGTTAAAAGTTGA
TTTATTGAGGCAAATGACAGATAGCGAATTGAAGGAGAAGTATAAGAGTA
TGTTGACTTCTCCTAGTGATACTAATGGTCAGACAAAGATAGGACTGGGA
AATGGTTCGTACTTTGGTCGTGCTTATAAAGCTGATGAAAGGGTTTCAAC
AATAGTACCTTTTTATATTGAATTAGGAGATGATAAGTTATGAAATCAAT
TACAGATAAATCGTAAGCGAAAAGTTGAAACAGGCGGATTAAAACTTATT
AAATATACAAAAGAAGGAAAGATAAAGAAAAGGCTATCCGGAGTAATATT
TGTATTATACGATAACCAGAATGAGGGAGTTCGCTTTAAAAATGGACGAT
TTACGACGGATCAAGATGGGATTAGTTGATTAGTAACTGATGATAAGGGA
GAAATTGAGGTTGAAGGTTTATTACGTGGTAAGTATATTTTTCGAGAAGC
AAAAGCACTAACTGGTTACCGTATATGTATGAAGGATGGTGTAGTTGCTG
TAGTTGCTAATAAAACACAGGAAGTAGAGGTAGAAAAcGAAAAAGAAACT
CCTCCACCAACAAATCCTAAACCATCACAACCGCTTTTTGCACAATCATT
TCTTCCTAAAACAGGAATGATTATTGGTGGAGGACTGACAATTCTTGGTT
GTATTATTTTGGGAATTTTGTTTATCTTTTTAAGAAAAACTAAAAATAGC
AAATCTGAAAGAAACGATACAGTA

SEQ ID NO: 27

MKKIRKSLGLLLCCFLGLVQLAFESVASVNADTPNQLTITQIGLQPNTTE
EGISYRLWTVTDNLKVDLLSQMTDSELNQKYKSILTSPTDTNGQTKIALP
NGSYFGRAYKADQSVSTIVPEYIELPDDKLSNQLQINPKRKVETGRLKLI
KYTKEGKIKKRLSGVIFVLYDNQNQPVRFKNGRFTTDQDGITSLVTDDKG
EIEVEGLLPGKYIFREAKALTGYRISMKDAVVAVVANKTQEVEVENEKET
PPPTNPKPSQPLFPQSFLPKTGMIIGGGLTILGCIILGILFIFLRKTKNS
KSERNDTV

[0964] GBS 150 contains an amino acid motif indicative of a cell wall anchor: SEQ ID NO: 130 LPKTG (shown in italics in SEQ ID NO: 27 above). In some recombinant host cell systems, it may be preferable to remove this motif to facilitate secretion of a recombinant GBS 150 protein from the host cell. Alternatively, in other recombinant host cell systems, it may be preferable to use the cell wall anchor motif to anchor the recombinantly expressed protein to the cell wall. The extracellular domain of the expressed protein may be cleaved during purification or the recombinant protein may be left attached to either inactivated host cells or cell membranes in the final composition.

[0965] As discussed above, a pilin motif, containing a conserved lysine (K) residue has been identified in GBS 150. The pilin motif sequence is underlined in SEQ ID NO: 27, below. Conserved lysine (K) residues are marked in bold, at amino acid residues 139 and 148. The pilin sequence, in particular the conserved lysine residues, are thought to be important for the formation of oligomeric, pilus-like structures of GBS 150. Preferred fragments of GBS 150 include a conserved lysine residue. Preferably, fragments include the pilin sequence.

SEQ ID NO: 27

MKKIRKSLGLLLCCFLGLVQLAFFSVASVNADTPNQLTITQIGLQPNTTE
EGISYRLWTVTDNLKVDLLSQMTDSELNQKYKSILTSPTDTNGQTKIALP
NGSYFGRAYKADQSVSTIVPFYIELPDDKLSNQLQINPKRKVETGRLKLI
KYTKEGKIKKRLSGVIFVLYDNQNQPVRFKNGRFTTDQDGITSLVTDDKG
EIEVEGLLPGKYIFREAKALTGYRISMKDAVVAVVANKTQEVEVENEKET
PPPTNPKPSQPLFPQSFLPKTGMIIGGGLTILGCTTLGILFIFLRKTKNS
KSERNDTV

[0966] An E box containing a conserved glutamic residue has also been identified in GBS 150. The E box motif is underlined in SEQ ID NO: 27 below. The conserved glutamic acid (E), at amino acid residue 216, is marked in bold. The E box motif, in particular the conserved glutamic acid residue, is thought to be important for the formation of oligomeric pilus-like structures of GBS 150. Preferred fragments of GBS 150 include the conserved glutamic acid residue. Preferably, fragments include the E box motif.

SEQ ID NO: 27

MKKIRKSLGLLLCCFLGLVQLAFFSVASVNADTPNQLTITQIGLQPNTTE
EGISYRLWTVTDNLKVDLLSQMTDSELNQKYKSILTSPTDTNGQTKIALP
NGSYFGRAYKADQSVSTIVPFYIELPDDKLSNQLQINPKRKVETGRLKLI
KYTKEGKIKKRLSGVIFVLYDNQNQPVRFKNGRFTTDQDGITSLVTDDKG
EIEVEGLLPGKYIFREAKALTGYRISMKDAVVAVVANKTQEVEVENEKET
PPPTNPKPSQPLFPQSFLPKTGMIIGGGLTILGCIILGILFIPLRKTKNS
KSERNDTV

[0967] Examples of polynucleotide and amino acid sequences for SAG1405 are set forth below. SEQ ID NO: 28 and 29 represent SAG1405 sequences from GBS serotype V, strain isolate 2603.

SEQ ID NO: 28

ATGGGAGGAAAATTTCAGAAAAACCTTAAGAAATCGGTCGTTTTAAATCG
ATGGATGAATGTAGGCTTGATACTATTGTTCTTAGTTGGTCTTTTGATAA
CCTCATATCCTTTTATTTCAAATTGGTACTATAATATTAAAGCTAATAAT
CAAGTAACTAACTTTGATAATCAAACCCAAAAATTAAATACTAAAGAGAT
TAATAGACGATTTGAGTTAGCAAAAGCTTATAATAGAACACTGGACCCAA
GCCGCCTATCAGATCCCTATACTGAAAAAGAAAAAAAAGGTATTGCTGAA
TACGCCCACATGCTTGAGATTGCTGAAATGATTGGATATATTGATATACC
GTCTATCAAGCAAAAATTACCTATCTATGCGGGGACTACCAGTAGTGTTC
TTGAAAAAGGAGCAGGACACCTTGAAGGAACCTCCTTGCCAATTGGTGGA
AAAAGTTCACATACTGTTATCACAGCTCATCGCGGCTTACCTAAAGCTAA
GTTATTTACAGATTTAGATAAACTTAAAAAAGGAAAAATTTTTTATATTC
ATAATATCAAAGAAGTTTTAGCCTATAAGGTTGATCAAATAAGTGTTGTA
AAGCCAGATAATTTTTCTAAATTATTGGTTGTTAAAGGTAAGGATTATGC
GACTTTGCTAACATGTACACCTTATTCGATTAATTCACATCGTTTACTAG
TTAGAGGGCATCGAATCAAGTATGTACCTCCTGTTAAAGAAAAGAACTAT
TTAATGAAAGAATTGCAAACACACTATAAACTTTATTTCCTCTTATCAAT
CCTAGTTATTCTTATATTAGTCGCTTTACTATTATATTTAAAACGAAAAT
TTAAAGAGAGAAAGAGAAAGGGAAATCAAAAATGA

SEQ ID NO: 29

MGGKFQKNLKKSVVLNRWMNVGLILLFLVGLLITSYPFISNWYYNIKANN
QVTNFDNQTQKLNTKEINRRFELAKAYNRTLDPSRLSDPYTEKEKKGIAE
YAHMLEIAEMIGYIDIPSIKQKLPIYAGTTSSVLEKGAGHLEGTSLPIGG
KSSHTVITAHRGLPKAKLFTDLDKLKKGKIFYIHNIKEVLAYKVDQISVV
KPDNFSKLLVVKGKDYATLLTCTPYSINSHRLLVRGHRIKYVPPVKEKNY
LMKELQTRYKLYFLLSILVILILVALLLYLKRKPKERKRKGNQK

SAG1406

[0968] Examples of polynucleotide and amino acid sequences for SAG1405 are set forth below. SEQ ID NO: 30 and 31 represent SAG1405 sequences from GBS serotype V, strain isolate 2603.

SEQ ID NO: 30

GTGAAGACTAAAAAAATCATCAAAAAAACAAAAAAAAAGAAGAAGTCAAA
TCTTCCTTTTATCATTCTTTTTCTAATAGGTCTATCTATTTTATTGTATC
CAGTGGTATCACGTTTTTACTATACGATAGAATCTAATAATCAAACACAG
GATTTTGAGAGAGCTGCTAAAAAACTTAGTCAGAAAGAAATCAATCGACG
TATGGCTCTAGCACAAGCTTATAATGATTCTTTAAATAATGTCCATCTTG
AAGATCCTTATGAGAAAAAACGAATTCAAAAGGGGGTAGCAGAGTACGCC
CGTATGTTAGAGGTAAGTGAAAAAATCGGAACAATTTCAGTTCCTAAGAT
AGGTCAAAAACTCCCTATATTTGCAGGTTCAAGTCAAGAAGTTCTATCTA
AAGGAGCAGGGCATTTAGAAGGTACCTCTCTTCCAATTGGGGGCAATAGT
ACACATACTGTTATAACAGCGCATTCAGGAATTCCAGATAAAGAACTCTT
TTCTAACCTTAAAAAGTTAAAAAAAGGAGATAAGTTTTATATTCAAAACA
TAAAAGAAACGATAGCATATCAAGTAGATCAGATAAAAGTCGTTACACCC
GATAACTTTTCAGATTTGTTGGTTGTTCCTGGACATGATTATGCAACCTT
ATTGACTTGCACCCCGATTATGATCAATACACACAGACTTTTAGTAAGGG
GACATCGTATCCCTTATAAAGGTCCTATTGATGAAAAATTAATAAAAGAC
GGTCATTTAAACACGATTTATAGATATCTATTCTATATATCTTTAGTTAT
TATTGCTTGGTTACTTTGGTTAATAAAACGTCAACGTCAAAAAAATCGTT
TAGCAAGTGTTAGAAAAGGAATTGAATCATAA

SEQ ID NO: 31

MKTKKIIKKTKKKKKSNLPFIILFLIGLSILLYPVVSRFYYTIESNNQTQ
DFERAAKKLSQKEINRRMALAQAYNDSLNNVHLEDPYEKKRIQKGVAEYA
RMLEVSEKIGTISVPKIGQKLPIFAGSSQEVLSKGAGHLEGTSLPIGGNS
THTVITAHSGIPDKELFSNLKKLKKGDKFYIQNIKETIAYQVDQIKVVTP
DNFSDLLVVPGHDYATLLTCTPTMINTHRLLVRGHRIPYKGPIDEKLIKD
GHLNTIYRYLFYISLVIIAWLLWLIKRQRQKNRLASVRKGIES

01520

[0969] An example of an amino acid sequence for 01520 is set forth below. SEQ ID NO: 32 represents a 01520 sequence from GBS serotype III, strain isolate COH1.

SEQ ID NO: 32

MIRRYSANFLAILGIILVSSGIYWGWYNINQAHQADLTSQHIVKVLDKSI
THQVKGSENGELPVKKLDKTDYLGTLDIPNLKLHLPVAANYSFEQLSKTP
TRYYGSYLTNNMVICAHNFPYHFDALKNVDMGTDVYFTTTTGQIYHYKIS
NREIIEPTAIEKVYKTATSDNDWDLSLFTCTKAGVARVLVRCQLIDVKN

01521

[0970] An example of an amino acid sequence for 01521 is set forth below. SEQ ID NO: 33 represents a 01521 sequence from GBS serotype III, strain isolate COH1.

SEQ ID NO: 33

MIYKKILKITLLLLFSLSTQLVSADTNDQMKTGSITIQNKYNNQGIAGGN
LLVYQVAQAKDVDGNQVFTLTTPFQGIGIKDDDLTQVNLDSNQAKYVNLL
TKAVHKTQPLQTFDNLPAEGIVANNLPQGIYLFIQTKTAQGYELMSPFIL
SIPKDGKYDITAFEKMSPLNAKPKKEETITPTVTHQTKGKLPFTGQVWWP
IPILIMSGLLCLIIALKWRRRRD

[0971] 01521 contains an amino acid motif indicative of a cell wall anchor: SEQ ID NO: 132 LPFTG (shown in italics in SEQ ID NO: 33 above). In some recombinant host cell systems, it may be preferable to remove this motif to facilitate secretion of a recombinant 01521 protein from the host cell. Alternatively, it may be preferable to use the cell wall anchor motif to anchor the recombinantly expressed protein to the cell wall. The extracellular domain of the expressed protein may be cleaved during purification or the recombinant protein may be left attached to either inactivated host cells or cell membranes in the final composition.

[0972] Two pilin motifs, containing conserved lysine (K) residues have been identified in 01521. The pilin motif sequences are underlined in SEQ ID NO: 33, below. Conserved lysine (K) residues are marked in bold, at amino acid residues 154 and 165 and at amino acid residues 174 and 188. The pilin sequences, in particular the conserved lysine residues, are thought to be important for the formation of oligomeric, pilus-like structures of 01521. Preferred fragments of 01521 include at least one conserved lysine residue. Preferably, fragments include at least one pilin sequence.

SEQ ID NO: 33

MIYKKILKITLLLLFSLSTQLVSADTNDQMKTGSITIQNKYNNQGIAGGN
LLVYQVAQAKDVDGNQVFTLTTPFQGIGIKDDDLTQVNLDSNQAKYVNLL
TKAVHKTQPLQTFDNLPAEGIVANNLPQGIYLFIQTKTAQGYELMSPFIL
SIPKDGKYDITAFEKMSPLNAKPKKEETITPTVTHQTKGKLPFTGQVWWP
TPILIMSGLLCLIIALKWRRRRD

[0973] An E box containing a conserved glutamic residue has also been identified in 01521. The E box motif is underlined in SEQ ID NO: 33 below. The conserved glutamic acid (E), at amino acid residue 177, is marked in bold. The E box motif, in particular the conserved glutamic acid residue, is thought to be important for the formation of oligomeric pilus-like structures of 01521. Preferred fragments of 01521 include the conserved glutamic acid residue. Preferably, fragments include the E box motif.

SEQ ID NO: 33

MIYKKILKTTLLLLFSLSTQLVSADTNDQMKTGSTTIQNKYNNQGIAGGN
LLVYQVAQAKDVDGNQVFTLTTPFQGIGIKDDDLTQVNLDSNQAKYVNLL
TKAVHKTQPLQTFDNLPAEGIVANNLPQGIYLFIQTKTAQGYELMSPFTL
SIPKDGKYDITAFEKMSPLNAKPKKEETITPTVTHQTKGKLPFTGQWPIP
ILIMSGLLCLIIALKWRRRRD

01522

[0974] An example of an amino acid sequence for 01522 is set forth below. SEQ ID NO: 34 represents a 01522 sequence from GBS serotype III, strain isolate COH1.

SEQ ID NO: 34

MAYPSLANYWNSFHQSRAIMDYQDRVTHMDENDYKKITNRAKEYNKQFKT
SGMKWHMTSQERLDYNSQLAIDKTGNMGYISIPKINIKLPLYHGTSEKVL
QTSIGHLEGSSLPIGGDSTHSILSGHRGLPSSRLFSDLDKLKVGDHWTVS
ILNETYTYQVDQIRTVKPDDLRDLQIVKGKDYQTLVTCTPYGVNTHRLLV
RGHRVPNDNGNALVVAEAIQIEPIYIAPFIAIFLTLILLLISLEVTRRAR
QRKKILKQAMRKEENNDL

01523

[0975] An example of an amino acid sequence for 01523 is set forth below. SEQ ID NO: 35 represents a 01523 sequence from GBS serotype III, strain isolate COH1.

SEQ ID NO: 35

MKKKMIQSLLVASLAFGMAVSPVTPIAFAAETGTITVQDTQKGATYKAYK
VFDAEIDNANVSDSNKDGASYLIPQGKEAEYKASTDFNSLFTTTTNGGRT
YVTKKDTASANEIATWAKSISANTTPVSTVTESNNDGTEVINVSQYGYYY
VSSTVNNGAVIMVTSVTPNATIHEKNTDATWGDGGGKTVDQKTYSVGDTV
KYTITYKNAVNYHGTEKVYQYVIKDTMPSASVVDLNEGSYEVTITDGSGN
ITTLTQGSEKATGKYNLLEENNNFTITIPWAATNTPTGNTQNGANDDFFY
KGINTITVTYTGVLKSGAKPGSADLPENTNIATINPNTSNDDPGQKVTVR
DGQITIKKIDGSTKASLQGAIFVLKNATGQFLNFNDTNNVEWGTEANATE
YTTGADGIITITGLKEGTYYLVEKKAPLGYNLLDNSQKVILGDGATDTTN
SDNLLVNPTVENNKGTELPSTGGIGTTIEYIIGAILVIGAGIVLVARRRL
RS

[0976] 01523 contains an amino acid motif indicative of a cell wall anchor: SEQ ID NO: 131 LPSTG (shown in italics in SEQ ID NO: 35 above). In some recombinant host cell systems, it may be preferable to remove this motif to facilitate secretion of a recombinant 01523 protein from the host cell. Alternatively, it may be preferable to use the cell wall anchor motif to anchor the recombinantly expressed protein to the cell wall. The extracellular domain of the expressed protein may be cleaved during purification or the recombinant protein may be left attached to either inactivated host cells or cell membranes in the final composition.

[0977] An E box containing a conserved glutamic residue has also been identified in 01523. The E box motif is underlined in SEQ ID NO: 35 below. The conserved glutamic acid (E), at amino acid residue 423, is marked in bold. The E box motif, in particular the conserved glutamic acid residue, is thought to be important for the formation of oligomeric pilus-like structures of 01523. Preferred fragments of 01523 include the conserved glutamic acid residue. Preferably, fragments include the E box motif.

SEQ ID NO: 35

MKKKMIQSLLVASLAFGMAVSPVTPIAFAAETGTITVQDTQKGATYKAYK
VFDAEIDNANVSDSNKDGASYLIPQGKEAEYKASTDFNSLFTTTTNGGRT
YVTKKDTASANEIATWAKSISANTTPVSTVTESNNDGTEVINVSQYGYYY
VSSTVNNGAVIMVTSVTPNATIHEKNTDATWGDGGGKTVDQKTYSVGDTV
KYTITYKNAVNYHGTEKVYQYVIKDTMPSASVVDLNEGSYEVTITDGSGN
ITTLTQGSEKATGKYNLLEENNNFTITIPWAATNTPTGNTQNGANDDFFY
KGINTITVTYTGVLKSGAKPGSADLPENTNIATINPNTSNDDPGQKVTVR
DGQITIKKIDGSTKASLQGAIFVLKNATGQFLNFNDTNNVEWGTEANATE
YTTGADGIITITGLKEGTYYLVEKKAPLGYNLLDNSQKVILGDGATDTTN
SDNLLVNPTVENNKGTELPSTGGIGTTIEYIIGAILVIGAGIVLVARRRL
RS

01524

[0978] An example of an amino acid sequence for 01524 is set forth below. SEQ ID NO: 36 represents a 01524 sequence from GBS serotype m, strain isolate COH1.

SEQ ID NO: 36

MLKKCQTFIIESLKKKKHPKEWKIIMWSLMILTTFLTTYFLILPAITVEE
TKTDDVGITLENKNSSQVTSSTSSSQSSVEQSKPQTPASSVTETSSSEEA
AYREEPLMFRGADYTVTVTLTKEAKIPKNADLKVTELKDNSATFKDYKKK
ALTEVAKQDSEIKNFKLYDITIESNGKEAEPQAPVKVEVNYDKPLEASDE
NLKVVHFKDDGQTEVLKSKDTAETKNTSSDVAFKTDSFSTYAIVQEDNTE
VPRLTYHFQNNDGTDYDPLTASGMQVHHQIIKDGESLGEVGIPTIKAGEH
FNGWYTYDPTTGKYGDPVKEGEPITVTETKEICVRPFMSKVATVTLYDDS
AGKSILERYQVPLDSSGNGTADLSSFKVSPPTSTLLFVGWSKTQNGAPLS
ESEIQALPVSSDISLYPVFKESYGVEFNTGDLSTGVTYIAPRRVLTGQPA
STIKPNDPTRPGYTFAGWYTAASGGAAFDFNQVLTKDTTLYAHWSPAQTT
YTINYWQQSATDNKNATDAQKTYEYAGQVTRSGLSLSNQTLTQQDINDKL
PTGFKVNNTRTETSVMIKDDGSSVVNVYYDRKLITIKFAKYGGYSLPEYY
YSYNWSSDADTYTGLYGTTLAANGYQWKTGAWGYLANVGNNQVGTYGMSY
LGEFILPNDTVDSDVIKLFPKGNIVQTYRFTKQGLDGTYSLADTGGGAGA
DEFTFTEKYLGFNVKYYQRLYPDNYLFDQYASQTSAGVKVPISDEYYDRY
GAYHKDYLNLVVWYERNSYKIKYLDPLDNTELPNFPVKDVLYEQNLSSYA
PDTTTVQPKPSRPGYVWDGKWYKDQAQTQVFDFNTTMPPHDVKVYAGWQK
VTYRVNIDPNGGRLSKTDDTYLDLHYGDRIPDYTDITRDYIQDPSGTYYY
KYDSRDKDPDSTKDAYYTTDTSLSNVDTTTKYKYVKDAYKLVGWYYVNPD
GSIRPYNFSGAVTQDINLRAIWRKAGDYHIIYSNDAVGTDGKPALDASGQ
QLQTSNEPTDPDSYDDGSHSALLRRPTMPDGYRFRGWWYNGKIYNPYDSI
DIDAHLADANKNITIKPVIIPVGDIKLEDTSIKYNGNGGTRVENGNVVTQ
VETPRMELNSTTTIPENQYFTRTGYNLIGWHHDKDLADTGRVEFTAGQSI
GIDNNPDATNTLYAVWQPKEYTVRVSKTVVGLDEDKTKDFLFNPSETLQQ
ENFPLRDGQTKEEKVPYGTSISIDEQAYDEFKVSESITEKNLATGEADKT
YDATGLQSLTVSGDVDISFTNTRIKQKVRLQKVNVENDNNFLAGAVFDIY
ESDANGNKASHPMYSGLVTNDKGLLLVDANNYLSLPVGKYYLTETKAPPG
YLLPKNDISVLVISTGVTFEQNGNNATPIKENLVDGSTVYTFKITNSKGT
ELPSTGGIGTHIYILVGLALALPSGLILYYRKKI

[0979] 01524 contains an amino acid motif indicative of a cell wall anchor: SEQ ID NO: 131 LPSTG (shown in italics in SEQ ID NO: 36 above). In some recombinant host cell systems, it may be preferable to remove this motif to facilitate secretion of a recombinant 01524 protein from the host cell. Alternatively, it may be preferable to use the cell wall anchor motif to anchor the recombinantly expressed protein to the cell wall. The extracellular domain of the expressed protein may be cleaved during purification or the recombinant protein may be left attached to either inactivated host cells or cell membranes in the final composition.

[0980] Three pilin motifs, containing conserved lysine (K) residues have been identified in 01524. The pilin motif sequences are underlined in SEQ ID NO: 36, below. Conserved lysine (K) residues are marked in bold, at amino acid residues 128 and 138, amino acid residues 671 and 682, and amino acid residues 809 and 820. The pilin sequences, in particular the conserved lysine residues, are thought to be important for the formation of oligomeric, pilus-like structures of 01524. Preferred fragments of 01524 include at least one conserved lysine residue. Preferably, fragments include at least one pilin sequence.

SEQ ID NO: 36

MLKKCQTFIIESLKKKKHPKEWKIIMWSLMILTTFLTTYFLILPAITVEE
TKTDDVGITLENKNSSQVTSSTSSSQSSVEQSKPQTPASSVTETSSSEEA
AYREEPLMFRGADYTVTVTLTKEAKIPKNADLKVTELKDNSATFKDYKKK
ALTEVAKQDSEIKNFKLYDITIESNGKEAEPQAPVKVEVNYDKPLEASDE
NLKVVHFKDDGQTEVLKSKDTAETKNTSSDVAFKTDSFSIYAIVQEDNTE
VPRLTYHFQNNDGTDYDPLTASGMQVHHQIIKDGESLGEVGIPTIKAGEH
FNGWYTYDPTTGKYGDPVKFGEPITVTETKEICVRPFMSKVATVTLYDDS
AGKSILERYQVPLDSSGNGTADLSSFKVSPPTSTLLFVGWSKTQNGAPLS
ESEIQALPVSSDISLYPVFKESYGVEFNTGDLSTGVTYIAPRRVLTGQPA
STIKPNDPTRPGYTFAGWYTAASGGAAFDFNQVLTKDTTLYAHWSPAQTT
YTINYWQQSATDNKNATDAQKTYEYAGQVTRSGLSLSNQTLTQQDINDKL
PTGFKVNNTRTETSVMIKDDGSSVVNVYYDRKLITIKFAKYGGYSLPEYY
YSYNWSSDADTYTGLYGTTLAANGYQWKTGAWGYLANVGNNQVGTYGMSY
LGEFILPNDTVDSDVIKLFPKGNIVQTYRFFKQGLDGTYSLADTGGGAGA
DEFTFTEKYLGFNVKYYQRLYPDNYLFDQYASQTSAGVKVPISDEYYDRY
GAYHKDYLNLVVWYERNSYKIKYLDPLDNTELPNFPVKDVLYEQNLSSYA
PDTTTVQPKPSRPGYVWDGKWYKDQAQTQVFDFNTTMPPHDVKVYAGWQK
VTYRVNIDPNGGRLSKTDDTYLDLHYGDRIPDYTDITRDYIQDPSGTYYY
KYDSRDKDPDSTKDAYYTTDTSLSNVDTTTKYKYVKDAYKLVGWYYVNPD
GSIRPYNFSGAVTQDINLRAIWRKAGDYHIIYSNDAVGTDGKPALDASGQ
QLQTSNEPTDPDSYDDGSHSALLRRPTMPDGYRFRGWWYNGKIYNPYDSI
DIDAHLADANKNITIKPVIIPVGDIKLEDTSIKYNGNGGTRVENGNVVTQ
VETPRMELNSTTTIPENQYFTRTGYNLIGWHHDKDLADTGRVEFTAGQSI
GIDNNPDATNTLYAVWQPKEYTVRVSKTVVGLDEDKTKDFLFNPSETLQQ
ENFPLRDGQTKEEKVPYGTSISIDEQAYDEFKVSESITEKNLATGEADKT
YDATGLQSLTVSGDVDISFTNTRIKQKVRLQKVNVENDNNFLAGAVFDIY
ESDANGNKASHPMYSGLVTNDKGLLLVDANNYLSLPVGKYYLTETKAPPG
YLLPKNDISVLVISTGVTFEQNGNNATPIKENLVDGSTVYTFKITNSKGT
ELPSTGGIGTHIYILVGLALALPSGLILYYRKKI

[0981] An E box containing a conserved glutamic residue has also been identified in 01524. The E box motif is underlined in SEQ ID NO: 36 below. The conserved glutamic acid (E), at amino acid residue 1344, is marked in bold. The E box motif, in particular the conserved glutamic acid residue, is thought to be important for the formation of oligomeric pilus-like structures of 01524. Preferred fragments of 01524 include the conserved glutamic acid residue. Preferably, fragments include the E box motif.

SEQ ID NO: 36

MLKKCQTFIIESLKKKKHPKEWKIIMWSLMILTTFLTTYFLILPAITVEE
TKTDDVGITLENKNSSQVTSSTSSSQSSVEQSKPQTPASSVTETSSSEEA
AYREEPLMFRGADYTVTVTLTKEAKIPKNADLKVTELKDNSATFKDYKKK
ALTEVAKQDSEIKNFKLYDITIESNGKEAEPQAPVKVEVNYDKPLEASDE
NLKVVHFKDDGQTEVLKSKDTAETKNTSSDVAFKTDSFSTYAIVQEDNTE
VPRLTYHFQNNDGTDYDPLTASGMQVHHQIIKDGESLGEVGIPTIKAGEH
FNGWYTYDPTTGKYGDPVKEGEPITVTETKEICVRPFMSKVATVTLYDDS
AGKSILERYQVPLDSSGNGTADLSSFKVSPPTSTLLFVGWSKTQNGAPLS
ESEIQALPVSSDISLYPVFKESYGVEFNTGDLSTGVTYIAPRRVLTGQPA
STIKPNDPTRPGYTFAGWYTAASGGAAFDFNQVLTKDTTLYAHWSPAQTT
YTINYWQQSATDNKNATDAQKTYEYAGQVTRSGLSLSNQTLTQQDINDKL
PTGFKVNNTRTETSVMIKDDGSSVVNVYYDRKLITIKFAKYGGYSLPEYY
YSYNWSSDADTYTGLYGTTLAANGYQWKTGAWGYLANVGNNQVGTYGMSY
LGEFILPNDTVDSDVIKLFPKGNIVQTYRFTKQGLDGTYSLADTGGGAGA
DEFTFTEKYLGFNVKYYQRLYPDNYLFDQYASQTSAGVKVPISDEYYDRY
GAYHKDYLNLVVWYERNSYKIKYLDPLDNTELPNFPVKDVLYEQNLSSYA
PDTTTVQPKPSRPGYVWDGKWYKDQAQTQVFDFNTTMPPHDVKVYAGWQK
VTYRVNIDPNGGRLSKTDDTYLDLHYGDRIPDYTDITRDYIQDPSGTYYY
KYDSRDKDPDSTKDAYYTTDTSLSNVDTTTKYKYVKDAYKLVGWYYVNPD
GSIRPYNFSGAVTQDINLRAIWRKAGDYHIIYSNDAVGTDGKPALDASGQ
QLQTSNEPTDPDSYDDGSHSALLRRPTMPDGYRFRGWWYNGKIYNPYDSI
DIDAHLADANKNITIKPVIIPVGDIKLEDTSIKYNGNGGTRVENGNVVTQ
VETPRMELNSTTTIPENQYFTRTGYNLIGWHHDKDLADTGRVEFTAGQSI
GIDNNPDATNTLYAVWQPKEYTVRVSKTVVGLDEDKTKDFLFNPSETLQQ
ENFPLRDGQTKEEKVPYGTSISIDEQAYDEFKVSESITEKNLATGEADKT
YDATGLQSLTVSGDVDISFTNTRIKQKVRLQKVNVENDNNFLAGAVFDIY
ESDANGNKASHPMYSGLVTNDKGLLLVDANNYLSLPVGKYYLTETKAPPG
YLLPKNDISVLVISTGVTFEQNGNNATPIKENLVDGSTVYTFKITNSKGT
ELPSTGGIGTHIYILVGLALALPSGLILYYRKKI

01525

[0982] An example of an amino acid sequence for 01525 is set forth below. SEQ ID NO: 37 represents a 01525 sequence from GBS serotype III, strain isolate COH1.

SEQ ID NO: 37

MKRQISSDKLSQELDRVTYQKRFWSVIKNTIYILMAVASIAILIAVLWLP
VLRIYGHSMNKTLSAGDVVFTVKGSNFKTGDVVAFYYNNKVLVKRVTAES
GDWVNIDSQGDVYVNQHKLKEPYVIHKALGNSNIKYPYQVPDKKIFVLGD
NRKTSIDSRSTSVGDVSEEQIVGKTSFRIWPLGKISSIN

GBS 322

[0983] GBS 322 refers to a surface immunogenic protein, also referred to as “sip”. Nucleotide and amino acid sequences of GBS 322 sequenced from serotype V isolated strain 2603 V/R are set forth in Ref. 3 as SEQ ID 8539 and SEQ OD 8540. These sequences are set forth below as SEQ ID NOS 38 and 39:

SEQ ID NO.38

ATGAATAAAAAGGTACTATTGACATCGACAATGGCAGCTTCGCTATTATC
AGTCGCAAGTGTTCAAGCACAAGAAACAGATACGACGTGGACAGCACGTA
CTGTTTCAGAGGTAAAGGCTGATTTGGTAAAGCAAGACAATAAATCATCA
TATACTGTGAAATATGGTGATACACTAAGCGTTATTTCAGAAGCAATGTC
AATTGATATGAATGTCTTAGCAAAAATAAATAACATTGCAGATATCAATC
TTATTTATCCTGAGACAACACTGACAGTAACTTACGATCAGAAGAGTCAT
ACTGCCACTTCAATGAAAATAGAAACACCAGCAACAAATGCTGCTGGTCA
AACAACAGCTACTGTGGATTTGAAAACCAATCAAGTTTCTGTTGCAGACC
AAAAAGTTTCTCTCAATACAATTTCGGAAGGTATGACACCAGAAGCAGCA
ACAACGATTGTTTGGCCAATGAAGACATATTCTTCTGCGCCAGCTTTGAA
ATCAAAAGAAGTATTAGCACAAGAGCAAGCTGTTAGTCAAGCAGCAGCTA
ATGAACAGGTATCACGAGCTCCTGTGAAGTCGATTACTTCAGAAGTTCCA
GCAGCTAAAGAGGAAGTTAAACCAACTCAGACGTCAGTCAGTCAGTCAAC
AACAGTATCACCAGCTTCTGTTGCCGCTGAAACACCAGCTCCAGTAGCTA
AAGTAGCACCGGTAAGAACTGTAGCAGCCCCTAGAGTGGCAAGTGTTAAA
GTAGTCACTCCTAAAGTAGAAACTGGTGCATCACCAGAGCATGTATCAGC
TCCAGCAGTTCCTGTGACTACGACTTCACCAGCTACAGACAGTAAGTTAC
AAGCGACTGAAGTTAAGAGCGTTCCGGTAGCACAAAAAGCTCCAACAGCA
ACACCGGTAGCACAACCAGCTTCAACAACAAATGCAGTAGCTGCACATCC
TGAAAATGCAGGGCTCCAACCTCATGTTGCAGCTTATAAAGAAAAAGTAG
CGTCAACTTATGGAGTTAATGAATTCAGTACATACCGTGCGGGAGATCCA
GGTGATCATGGTAAAGGTTTAGCAGTTGACTTTATTGTAGGTACTAATCA
AGCACTTGGTAATAAAGTTGCACAGTACTCTACACAAAATATGGCAGCAA
ATAACATTTCATATGTTATCTGGCAACAAAAGTTTTACTCAAATACAAAC
AGTATTTATGGACCTGCTAATACTTGGAATGCAATGCCAGATCGTGGTGG
CGTTACTGCCAACCACTATGACCACGTTCACGTATCATTTAACAAATAAT
ATAAAAAAGGAAGCTATTTGGCTTCTTTTTTATATGCCTTGAATAGACTT
TCAAGGTTCTTATATAATTTTTATTA

SEQ ID NO.39

MNKKVLLTSTMAASLLSVASVQAQETDTTWTARTVSEVKADLVKQDNKSS
YTVKYGDTLSVISEAMSIDMNVLAKINNIADINLIYPETTLTVTYDQKSH
TATSMKIETPATNAAGQTTATVDLKTNQVSVADQKVSLNTISEGMTPEAA
TTIVSPMKTYSSAPALKSKEVLAQEQAVSQAAANEQVSPAPVKSITSEVP
AAKEEVKPTQTSVSQSTTVSPASVAAETPAPVAKVAPVRTVAAPRVASVK
VVTPKVETGASPEHVSAPAVPVTTTSPATDSKLQATEVKSVPVAQKAPTA
TPVAQPASTTNAVAAHPENAGLQPHVAAYKEKVASTYGVNEFSTYRAGDP
GDHGKGLAVDFIVGTNQALGNKVAQYSTQNMAANNISYVIWQQKFYSNTN
SIYGPANTWNAMPDRGGVTANHYDHVHVSFNK

[0984] GBS 322 contains an N-terminal leader or signal sequence region which is indicated by the underlined sequence near the beginning of SEQ ID NO: 39. In one embodiment, one or more amino acids from the leader or signal sequence region of GBS 322 are removed. An example of such a GBS 322 fragment is set forth below as SEQ ID NO: 40.

SEQ ID NO: 40

DLVKQDNKSSYTVKYGDTLSVISEAMSIDMNVLAKINNIADINLIYPETT
LTVTYDQKSHTATSMKIETPATNAAGQTTATVDLKTNQVSVADQKVSLNT
ISEGMTPEAATTIVSPMKTYSSAPALKSKEVLAQEQAVSQAAANEQVSPA
PVKSITSENPAAKEEVKPTQTSVSQSTTVSPASVAAETPAPVAKVAPVRT
VAAPRVASVKVVTPKVETGASPEHVSAPAVPVTTTSPATDSKLQATEVKS
VPVAQKAPTATPVAQPASTTNAVAAHPENAGLQPHVAAYKEKVASTYGVN
EFSTYRAGDPGDHGKGLAVDFIVGTNQALGNKVAQYSTQNMAANNISYVI
WQQKFYSNTNSIYGPANTWNAMPDRGGVTANHYDHVHVSFNK

[0985] Additional preferred fragments of GBS 322 comprise the immunogenic epitopes identified in WO 03/068813, each of which are specifically incorporated by reference herein.

[0986] There may be an upper limit to the number of GBS proteins which will be in the compositions of the invention. Preferably, the number of GBS proteins in a composition of the invention is less than 20, less than 19, less than 18, less than 17, less than 16, less than 15, less than 14, less than 13, less than 12, less than 11, less than 10, less than 9, less than 8, less than 7, less than 6, less than 5, less than 4, or less than 3. Still more preferably, the number of GBS proteins in a composition of the invention is less than 6, less than 5, or less than 4. Still more preferably, the number of GBS proteins in a composition of the invention is 3.

[0987] The GBS proteins and polynucleotides used in the invention are preferably isolated, i.e., separate and discrete, from the whole organism with which the molecule is found in nature or, when the polynucleotide or polypeptide is not found in nature, is sufficiently free of other biological macromolecules so that the polynucleotide or polypeptide can be used for its intended purpose.

Group A Streptococcus Adhesin Island Sequences

[0988] The GAS AI polypeptides of the invention can, of course, be prepared by various means (e.g. recombinant expression, purification from GAS, chemical synthesis etc.) and in various forms (e.g. native, fusions, glycosylated, non-glycosylated etc.). They are preferably prepared in substantially pure form (i.e. substantially free from other streptococcal or host cell proteins) or substantially isolated form.

[0989] The GAS AI proteins of the invention may include polypeptide sequences having sequence identity to the identified GAS proteins. The degree of sequence identity may vary depending on the amino acid sequence (a) in question, but is preferably greater than 50% (e.g. 60%, 65%, 70%, 75%, 80%, 85%, 90%, 91%, 92%, 93%, 94%, 95%, 96%, 97%, 98%, 99%, 99.5% or more). Polypeptides having sequence identity include homologs, orthologs, allelic variants and functional mutants of the identified GBS proteins. Typically, 50% identity or more between two proteins is considered to be an indication of functional equivalence. Identity between proteins is preferably determined by the Smith-Waterman homology search algorithm as implemented in the MPSRCH program (Oxford Molecular), using an affinity gap search with parameters gap open penalty=12 and gap extension penalty=1.

[0990] The GAS adhesin island polynucleotide sequences may include polynucleotide sequences having sequence identity to the identified GAS adhesin island polynucleotide sequences. The degree of sequence identity may vary depending on the polynucleotide sequence in question, but is preferably greater than 50% (e.g. 60%, 65%, 70%, 75%, 80%, 85%, 90%, 91%, 92%, 93%, 94%, 95%, 96%, 97%, 98%, 99%, 99.5% or more).

[0991] The GAS adhesin island polynucleotide sequences of the invention may include polynucleotide fragments of the identified adhesin island sequences. The length of the fragment may vary depending on the polynucleotide sequence of the specific adhesin island sequence, but the fragment is preferably at least 10 consecutive polynucleotides, (e.g. at least 10, 12, 14, 16, 18, 20, 25, 30, 35, 40, 50, 60, 70, 80, 90, 100, 150, 200 or more).

[0992] The GAS adhesin island amino acid sequences of the invention may include polypeptide fragments of the identified GAS proteins. The length of the fragment may vary depending on the amino acid sequence of the specific GAS antigen, but the fragment is preferably at least 7 consecutive amino acids, (e.g. 8, 10, 12, 14, 16, 18, 20, 25, 30, 35, 40, 50, 60, 70, 80, 90, 100, 150, 200 or more). Preferably the fragment comprises one or more epitopes from the sequence. Other preferred fragments include (1) the N-terminal signal peptides of each identified GAS protein, (2) the identified GAS protein without their N-terminal signal peptides, and (3) each identified GAS protein wherein up to 10 amino acid residues (e.g. 1, 2, 3, 4, 5, 6, 7, 8, 9, 10, 15, 20, 25 or more) are deleted from the N-terminus and/or the C-terminus e.g. the N-terminal amino acid residue may be deleted. Other fragments omit one or more domains of the protein (e.g. omission of a signal peptide, of a cytoplasmic domain, of a transmembrane domain, or of an extracellular domain).

[0993] GAS AI-1 Sequences

[0994] As discussed above, a GAS AI-1 sequence is present in an M6 strain isolate (MGAS10394). Examples of GAS AI-1 sequences from M6 strain isolate MGAS10394 are set forth below.

[0995] M6_Spy0156: Spy0156 is a rofA transcriptional regulator. An example of an amino acid sequence for M6_Spy0156 is set forth in SEQ ID NO: 41.

SEQ ID NO: 41

MIEKYLESSIESKCQLVVLEFKTSYLPITEVAEKTGLTFLQLNHYCEELN
AFFPDSLSMTIQKRMISCQFTHPFKETYLYQLYASSNVLQLLAFLIKNGS
HSRPLTDFARSHFLSNSSAYRMREALIPLLRNFELKLSKNKIVGEEYRIR
YLIALLYSKFGIKVYDLTQQDKNTIHSFLSHSSTHLKTSPWLSESFSFYD
ILLALSWKRHQFSVTIPQTRIFQQLKKLFIYDSLKKSSRDIIETYCQLNF
SAGDLDYLYLIYITANNSFASLQWTPEHIRQCCQLFEENDTFRLLLKPII
TLLPNLKEQKPSLVKALMFESKSFLENLQHFIPETNLFVSPYYKGNQKLY
TSLKLIVEEWLAKLPGKRYLNHKHFHLFCHYVEQILRNIQPPLVVVFVAS
NFINAHLLTDSFPRYFSDKSIDFHSYIAR

[0996] M6_Spy0157: M6_Spy0157 is a fibronectin binding protein. It contains a sortase substrate motif LPXTG (SEQ ID NO: 122), shown in italics in the amino acid sequence SEQ ID NO: 42.

SEQ ID NO: 42

MVSSYMFVRGEKMNNKIFLNKEASFLAHTKRKRRFAVTLVGVFFMLLACA
GAIGFGQVAYAADEKTVPSHSSPNPEFPWYGYDAYGKEYPGYNIWTRYHD
LRVNLNGSRSYQVYCFNIQSNYPSQKNSEIKNWFKKIEGNGKSFVDYAHT
TKLGKEELEQRLLSLLYNAYPNDANGYMKGLEHLNAITVTQYAVWHYSDN
SQYQFETLWESEAKEGKISRSQVTLMREALKKLIDPNLEATAVNKIPSGY
RLNIFESENEAYQNLLSAEYVPDDPPKPGETSEHNPKTPELDGTPIPEDP
KHPDDNLEPTLPPVMLDGEEVPEVPSESLEPALPPLMPELDGQEVPEKPS
IDLPIEVPRYEFNNKDQSPLAGESGETEYITEVYGNQQNPVDIDKKLPNE
TGFSGNMVETEDTKEPEVLMGGQSESVEFTKDTQTGMSGQTTPQVETEDT
KEPEVLMGGQSESVEFTKDTQTGMSGQTTPQIETEDTKEPEVLMGGQSES
VEFTKDTQTGMSGQTTPQIETEDTKEPEVLMGGQSESVEFTKDTQTGMSG
FSETATVVEDTRPKLVFHFDNNEPKVEENREKPTKNITPILPATGDIENV
LAFLGILILSVLSIFSLLKNKQSNKKV

[0997] M6_Spy0157 contains an amino acid motif indicative of a cell wall anchor: SEQ ID NO: 180 LPATG (shown in italics in SEQ ID NO: 42, above). In some recombinant host cell systems, it may be preferable to remove this motif to facilitate secretion of a recombinant M6_Spy0157 protein from the host cell. Alternatively, in other recombinant host cell systems, it may be preferable to use the cell wall anchor motif to anchor the recombinantly expressed protein to the cell wall. The extracellular domain of the expressed protein may be cleaved during purification or the recombinant protein may be left attached to either inactivated host cells or cell membranes in the final composition.

[0998] A pilin motif, discussed above, containing a conserved lysine (K) residue has also been identified in M6_Spy0157. The pilin motif sequence is underlined in SEQ ID NO: 42, below. Conserved lysine (K) residues are also marked in bold, at amino acid residues 277, 287, and 301. The pilin sequence, in particular the conserved lysine residues, are thought to be important for the formation of oligomeric, pilus-like structures. Preferred fragments of M6_Spy0157 include at least one conserved lysine residue. Preferably, fragments include the pilin sequence.

SEQ ID NO: 42

MVSSYMFVRGEKMNNKTFLNKEASFLAHTKRKRRFAVTLVGVFFMLLACA
GAIGFGQVAYAADEKTVPSHSSPNPEFPWYGYDAYGKEYPGYNIWTRYHD
LRVNLNGSRSYQVYCFNIQSNYPSQKNSFIKNWFKKIEGNGKSFVDYAHT
TKLGKEELEQRLLSLLYNAYPNDANGYMKGLEHLNAITVTQYAVWHYSDN
SQYQFETLWESEAKEGKISRSQVTLMREALKKLIDPNLEATAVNKIPSGY
RLNIFESENEAYQNLLSAEYVPDDPPKPGETSEHNPKTPELDGTPTPEDP
KHPDDNLEPTLPPVMLDGEEVPEVPSESLEPALPPLMPELDGQEVPEKPS
TDLPIEVPRYEFNNKDQSPLAGESGETEYITEVYGNQQNPVDIDKKLPNE
TGFSGNMVETEDTKEPEVLMGGQSESVEFTKDTQTGMSGQTTPQVETEDT
KEPEVLMGGQSESVEFTKDTQTGMSGQTTPQIETEDTKEPEVLMGGQSES
VEFTKDTQTGMSGQTTPQIETEDTKEPEVLMGGQSESVEFTKDTQTGMSG
ESETATVVEDTRPKLVFHFDNNEPKVEENREKPTKNITPILPATGDIENV
LAFLGILILSVLSIFSLLKNKQSNKKV

[0999] A repeated series of four E boxes containing a conserved glutamic residue have been identified in M6_Spy0157. The E-box motifs are underlined in SEQ ID NO: 42, below. The conserved glutamic acid (E) residues, at amino acid residues 415, 452, 489, and 526 are marked in bold. The E box motif, in particular the conserved glutamic acid residue, is thought to be important for the formation of oligomeric pilus-like structures of M6_Spy0157. Preferred fragments of M6_Spy0157 include at least one conserved glutamic acid residue. Preferably, fragments include at least one E box motif.

SEQ ID NO: 42

MVSSYMFVRGEKMNNKIFLNKEASFLAHTKRKRRFAVTLVGVFFMLLACA
GAIGFGQVAYAADEKTVPSHSSPNPEFPWYGYDAYGKEYPGYNIWTRYHD
LRVNLNGSRSYQVYCFNIQSNYPSQKNSFIKNWFKKIEGNGKSFVDYAHT
TKLGKEELEQRLLSLLYNAYPNDANGYMKGLEHLNAITVTQYAVWHYSDN
SQYQFETLWESEAKEGKISRSQVTLMREALKKLIDPNLEATAVNKIPSGY
RLNIFESENEAYQNLLSAEYVPDDPPKPGETSEHNPKTPELDCTPIPEDP
KHPDDNLEPTLPPVMLDGEEVPEVPSESLEPALPPLMPELDGQEVPEKPS
IDLPIEVPRYEFNNKDQSPLAGESGETEYITEVYGNQQNPVDIDKKLPNE
TGFSGNMVETEDTKEPEVLMGGQSESVEFTKDTQTGMSGQTTPQVETEDT
KEPEVLMGGQSESVEFTKDTQTGMSGQTTPQIETEDTKEPEVLMGGQSES
VEFTKDTQTGMSGQTTPQIETEDTKEPEVLMGGQSESVEFTKDTQTGMSG
FSETATVVEDTRPKLVFHFDNNEPKVEENREKPTKNITPILPATGDIENV
LAFLGILILSVLSIFSLLKNKQSNKKV

[1000] M6_Spy0158: M6_Spy0158 is a reverse transcriptase. An example of Spy0158 is shown in the amino acid sequence SEQ ID NO 43.

SEQ ID NO: 43

MSLRHQNKKGIRKEGWKSRPQSRWSDHCQLVAQKSVLKQAISKTVLAERGLFSCLDDYLERHALKVN

[1001] M6_Spy0159: M6_Spy0159 is a collagen adhesion protein. It contains a sortase substrate motif LPXSG, shown in italics in the amino acid sequence SEQ ID NO: 44.

SEQ ID NO: 44

MYSRLKRELVIVINRKKKYKLIRLMVTVGLIFSQLVLPIRRLGLQMISTQ
TKVIPQEIVTQTETQGTQVVATKQKLESENSSLKVALKRESGFEHNATID
ASLDTESQGDNSQRSVTQAIVTMALELRKQGLSIVDTKIVRIQSSTNQRN
DITTTLTFKNGLSLEGASTEANDPNVRVGIVNPNDTVQTITPTIKQDADG
KVKNLVFTGRLGKQVIIVSTTRLKEEQTISLDSYGELVIDGAVGLSQKDR
PPYSKPITVNILKPKLSSIESSLDSKDFETVKTIDNLYTWDDQFYLLDFI
SKQYEVLKTDYQSAKDSTPQTRKILFGEYTVEPLVMNKGHNNTINIYIRS
TRPLGLKPIGAAPALIQPRSFRSLTPRSTRMKRSAPVEKFEGELEHHKRI
DYLGDNQNNPDTTIDDKEDEHDTSDLYRLYLDMTGKKNPLDILVVVDKSG
SMQEGIGSVQRYRYYAQRWDDYYSQWVYHGTFDYSSYQGESFNRGQIHYR
YRGIVSVSDGIRRDDAVKNSLLGVNGLLQRFVNINPENKLSVIGFQGSAD
YHAGKWYPDQSPRGGFYQPNLNNSRDAELLKGWSTNSLLDPNTLTALHNN
GTNYHAALLKAKEILNEVKDDGRRKIMIFISDGVPTEYFGEDGYRSGNGS
SNDRNNVTRSQEGSKLAIDEFKARYPNLSIYSLGVSKDINSDTASSSPVV
LKYLSGEEHYYGITDTAELEKTLNKIVEDSKLSQLGISDSLSQYVDYYDK
QPDVLVTRKSKVNDETEILYQKDQVQEAGKDIIDKVVFTPKTTSQPKGKV
TLTFKSDYKVDDEYTYTLSFNVKASDEAYEKYKDNEGRYSEMGDSDTDYG
TNQTSSGKGGLPSNSDASVNYMADGREQKLPYKHPVIQVKTVPITFTKVD
ADNNQKKLAGVEFELRKEDKKIVWEKGTTGSNGQLNFKYLQKGKTYYLYE
TKAKLGYTLPENPWEVAVANNGDIKVKHPIEGELKSKDGSYMIKNYKIYQ
LPSSGGRGSQIFIIVGSMTATVALLFYRRQHRKKQY

[1002] M6_Spy0159 contains an amino acid motif indicative of a cell wall anchor: SEQ ID NO: 181 LPSSG (shown in italics in SEQ ID NO: 44, above). In some recombinant host cell systems, it may be preferable to remove this motif to facilitate secretion of a recombinant M6_Spy0159 protein from the host cell. Alternatively, in other recombinant host cell systems, it may be preferable to use the cell wall anchor motif to anchor the recombinantly expressed protein to the cell wall. The extracellular domain of the expressed protein may be cleaved during purification or the recombinant protein may be left attached to either inactivated host cells or cell membranes in the final composition.

[1003] A pilin motif, discussed above, containing a conserved lysine (K) residue has also been identified in M6_Spy0159. The pilin motif sequence is underlined in SEQ ID NO: 44, below. Conserved lysine (K) residues are also marked in bold, at amino acid residues 265 and 276. The pilin sequence, in particular the conserved lysine residues, are thought to be important for the formation of oligomeric, pilus-like structures. Preferred fragments of M6_Spy0159 include at least one conserved lysine residue. Preferably, fragments include the pilin sequence.

SEQ ID NO: 44

MYSRLKRELVIVINRKKKYKLIRLMVTVGLIFSQLVLPIRRLGLQMISTQ
TKVIPQEIVTQTETQGTQVVATKQKLESENSSLKVALKRESGFEHNATID
ASLDTESQGDNSQRSVTQAIVTMALELRKQGLSIVDTKIVRIQSSTNQRN
DITTTLTFKNGLSLEGASTEANDPNVRVGIVNPNDTVQTITPTIKQDADG
KVKNLVFTGRLGKQVIIVSTTRLKEEQTISLDSYGELVIDGAVGLSQKDR
PPYSKPITVNILKPKLSSIESSLDSKDFETVKTIDNLYTWDDQFYLLDFI
SKQYEVLKTDYQSAKDSTPQTRKILFGEYTVEPLVMNKGHNNTINIYIRS
TRPLGLKPIGAAPALIQPRSFRSLTPRSTRMKRSAPVEKFEGELEHHKRI
DYLGDNQNNPDTTIDDKEDEHDTSDLYRLYLDMTGKKNPLDILVVVDKSG
SMQEGIGSVQRYRYYAQRWDDYYSQWVYHGTFDYSSYQGESFNRGQIHYR
YRGIVSVSDGIRRDDAVKNSLLGVNGLLQRFVNINPENKLSVIGFQGSAD
YHAGKWYPDQSPRGGFYQPNLNNSRDAELLKGWSTNSLLDPNTLTALHNN
GTNYHAALLKAKEILNEVKDDGRRKIMIFISDGVPTEYFGEDGYRSGNGS
SNDRNNVTRSQEGSKLAIDEFKARYPNLSIYSLGVSKDINSDTASSSPVV
LKYLSGEEHYYGITDTAELEKTLNKIVEDSKLSQLGISDSLSQYVDYYDK
QPDVLVTRKSKVNDETEILYQKDQVQEAGKDIIDKVVFTPKTTSQPKGKV
TLTFKSDYKVDDEYTYTLSFNVKASDEAYEKYKDNEGRYSEMGDSDTDYG
TNQTSSGKGGLPSNSDASVNYMADGREQKLPYKHPVIQVKTVPITFTKVD
ADNNQKKLAGVEFELRKEDKKIVWEKGTTGSNGQLNFKYLQKGKTYYLYE
TKAKLGYTLPENPWEVAVANNGDIKVKHPIEGELKSKDGSYMIKNYKIYQ
LPSSGGRGSQIFIIVGSMTATVALLFYRRQHRKKQY

[1004] An E box containing a conserved glutamic residue has been identified in M6_Spy0159. The E-box motif is underlined in SEQ ID NO: 44, below. The conserved glutamic acid (E), at amino acid residue 950, is marked in bold. The E box motif, in particular the conserved glutamic acid residue, is thought to be important for the formation of oligomeric pilus-like structures of M6_Spy0159. Preferred fragments of M6_Spy0159 include the conserved glutamic acid residue. Preferably, fragments include the E box motif.

SEQ ID NO: 44

MYSRLKRELVIVINRKKKYKLIRLMVTVGLIFSQLVLPIRRLGLQMISTQ
TKVIPQEIVTQTETQGTQVVATKQKLESENSSLKVALKRESGFEHNATID
ASLDTESQGDNSQRSVTQAIVTMALELRKQGLSIVDTKIVRIQSSTNQRN
DITTTLTFKNGLSLEGASTEANDPNVRVGIVNPNDTVQTITPTIKQDADG
KVKNLVFTGRLGKQVIIVSTTRLKEEQTISLDSYGELVIDGAVGLSQKDR
PPYSKPITVNILKPKLSSIESSLDSKDFETVKTIDNLYTWDDQFYLLDFI
SKQYEVLKTDYQSAKDSTPQTRKILFGEYTVEPLVMNKGHNNTINIYIRS
TRPLGLKPIGAAPALIQPRSFRSLTPRSTRMKRSAPVEKFEGELEHHKRI
DYLGDNQNNPDTTIDDKEDEHDTSDLYRLYLDMTGKKNPLDILVVVDKSG
SMQEGIGSVQRYRYYAQRWDDYYSQWVYHGTFDYSSYQGESFNRGQIHYR
YRGIVSVSDGIRRDDAVKNSLLGVNGLLQRFVNINPENKLSVIGFQGSAD
YHAGKWYPDQSPRGGFYQPNLNNSRDAELLKGWSTNSLLDPNTLTALHNN
GTNYHAALLKAKEILNEVKDDGRRKIMIFISDGVPTEYFGEDGYRSGNGS
SNDRNNVTRSQEGSKLAIDEFKARYPNLSIYSLGVSKDINSDTASSSPVV
LKYLSGEEHYYGITDTAELEKTLNKIVEDSKLSQLGISDSLSQYVDYYDK
QPDVLVTRKSKVNDETEILYQKDQVQEAGKDIIDKVVFTPKTTSQPKGKV
TLTFKSDYKVDDEYTYTLSFNVKASDEAYEKYKDNEGRYSEMGDSDTDYG
TNQTSSGKGGLPSNSDASVNYMADGREQKLPYKHPVIQVKTVPITFTKVD
ADNNQKKLAGVEFELRKEDKKIVWEKGTTGSNGQLNFKYLQKGKTYYLYE
TKAKLGYTLPENPWEVAVANNGDIKVKHPIEGELKSKDGSYMIKNYKIYQ
LPSSGGRGSQIFIIVGSMTATVALLFYRRQHRKKQY

[1005] M6_Spy0160: M6_Spy0160 is a fimbrial structural subunit. It contains a sortase substrate motif LPXTG (SEQ ID NO: 122), shown in italics in amino acid sequence SEQ ID NO: 45.

SEQ ID NO: 45

MTNRRETVREKILITAKKLMLACLATLAVVGLGMTRVSALSKDDTAQLKI
TNIEGGPTVTLYKIGEGVYNTNGDSFINFKYAEGVSLTETGPTSQEITTI
ANGINTGKIKPFSTENVSISNGTATYNARGASVYIALLTGATDGRTYNPI
LLAASYNGEGNLVTKNIDSKSNYLYGQTSVAKSSLPSITKKVTGTIDDVN
KKTTSLGSVLSYSLTFELPSYTKEAVNKTVYVSDNMSEGLTFNFNSLTVE
WKGKMANITEDGSVMVENTKIGIAKEVNNGFNLSFIYDSLESISPNISYK
AVVNNKAIVGEEGNPNKAEFFYSNNPTKGNTYDNLDKKPDKGNGITSKED
SKIVYTYQIAFRKVDSVSKTPLTGAIFGVYDTSNKLIDIVTTNKNGYAIS
TQVSSGKYKIKELKAPKGYSLNTETYEITANWVTATVKTSANSKSTTYTS
DKNKATDNSEQVGWLKNGIFYSIDSRPTGNDVKEAYIESTKALTDGTTFS
KSNEGSGTVLLETDIPNTKLGELPSTGSIGTYLEKAIGSAAMIGAIGIYI
VKRRKA

[1006] M6_Spy0160 contains an amino acid motif indicative of a cell wall anchor: SEQ ID NO: 131 LPSTG (shown in italics in SEQ ID NO: 45, above). In some recombinant host cell systems, it may be preferable to remove this motif to facilitate secretion of a recombinant M6_Spy0160 protein from the host cell. Alternatively, in other recombinant host cell systems, it may be preferable to use the cell wall anchor motif to anchor the recombinantly expressed protein to the cell wall. The extracellular domain of the expressed protein may be cleaved during purification or the recombinant protein may be left attached to either inactivated host cells or cell membranes in the final composition.

[1007] An E box containing a conserved glutamic residue has been identified in M6_Spy0160. The E-box motif is underlined in SEQ ID NO: 45, below. The conserved glutamic acid (E), at amino acid residue 412, is marked in bold. The E box motif, in particular the conserved glutamic acid residue, is thought to be important for the formation of oligomeric pilus-like structures of M6_Spy0160. Preferred fragments of M6_Spy0160 include the conserved glutamic acid residue. Preferably, fragments include the E box motif.

SEQ ID NO: 45

MTNRRETVREKILITAKKLMLACLATLAVVGLGMTRVSALSKDDTAQLKI
TNIEGGPTVTLYKIGEGVYNTNGDSFINFKYAEGVSLTETGPTSQEITTI
ANGINTGKIKPFSTENVSISNGTATYNARGASVYIALLTGATDGRTYNPI
LLAASYNGEGNLVTKNIDSKSNYLYGQTSVAKSSLPSITKKVTGTIDDVN
KKTTSLGSVLSYSLTFELPSYTKEAVNKTVYVSDNMSEGLTFNFNSLTVE
WKGKMANITEDGSVMVENTKIGIAKEVNNGFNLSFIYDSLESISPNISYK
AVVNNKAIVGEEGNPNKAEFFYSNNPTKGNTYDNLDKKPDKGNGITSKED
SKIVYTYQIAFRKVDSVSKTPLTGAIFGVYDTSNKLIDIVTTNKNGYAIS
TQVSSGKYKIKELKAPKGYSLNTETYEITANWVTATVKTSANSKSTTYTS
DKNKATDNSEQVGWLKNGIFYSIDSRPTGNDVKEAYIESTKALTDGTTFS
KSNEGSGTVLLETDIPNTKLGELPSTGSIGTYLFKAIGSAAMIGAIGIYI
VKRRKA

[1008] M6_Spy0161 is a srtB type sortase. An example of an amino acid sequence of M6_Spy-161 is shown in SEQ ID NO: 46.

SEQ ID NO: 46

MTERLKNLGILLLFLLGTAIFLYPTLSSQWNAYRDRQLLSTYHKQVIQKK
PSEMEEVWQKAKAYNARLGIQPVPDAFSFRDGIHDKNYESLLQIENNDIM
GYVEVPSIKVTLPIYHYTTDEVLTKGAGHLFGSALPVGGDGTHTVISAHR
GLPSAEMFTNLNLVKKGDTFYFRVLNKVLAYKVDQILIVEPDQATSLSGV
MGKDYATLVTCTPYGVNTKRLLVRGHRIAYHYKKYQQAKKAMKLVDKSRM
WAEVVCAAFGVVIAIILVFMYSRVSAKKSK

[1009] As discussed above, applicants have also determined the nucleotide and encoded amino acid sequence of fimbrial structural subunits in several other GAS AI-1 strains of bacteria. Examples of sequences of these fimbrial structural subunits are set forth below.

[1010] M6 strain isolate CDC SS 410 is a GAS AI-1 strain of bacteria. CDC SS 410_fimbrial is thought to be a fimbrial structural subunit of M6 strain isolate CDC SS 410. An example of a nucleotide sequence encoding the CDC SS 410_fimbrial protein (SEQ ID NO: 267) and a CDC SS 410_fimbrial protein amino acid sequence (SEQ ID NO: 268) are set forth below.

SEQ ID NO: 267

aaagatgatactgcacaactaaagataacaaatattgaaggtgggccaac
agtaacactttataaaataggagaaggtgtttacaacactaatggtgatt
cttttattaactttaaatatgctgagggggtttctttaactgaaacagga
cctacatcacaagaaattactactattgcaaatggtattaatacgggtaa
aataaagccttttagtactgaaaacgttagtatttctaatggaacagcaa
cttataatgcgagaggtgcatctgtttatattgcattattaacaggtgcg
acagatggccgtacctacaatcctattttattagctgcatcttataatgg
tgagggaaatttagttactaaaaatattgattccaaatctaattatttat
atggacaaacaagtgttgcaaaatcatcattaccatctattacaaagaaa
gtaaccgggacaatagatgacgtgaataaaaagactacctcgttaggaag
tgtattgtcttattcgctgacatttgaattaccaagttataccaaagaag
cagtcaataaaacagtatatgtttctgataatatgtcggaaggtcttact
tttaactttaatagtcttacagtagaatggaaaggtaagatggctaatat
tactgaagatggttcagtaatggtagaaaatacaaaaatcggaatagcta
aggaggttaataacggttttaatttaagttttatttatgatagtttagaa
tctatatcaccaaatataagttataaagctgttgtaaacaataaagctat
tgttggtgaagagggtaatcctaataaagctgaattcttctattcaaata
atccaacaaaaggtaatacatacgataatttagataagaagcctgataaa
gggaatggtattacatccaaagaagattctaaaattgtttatacttatca
aatagcgtttagaaaagttgatagtgttagtaagaccccacttattggtg
caatttttggagtttatgatactagtaataaattaattgatattgttaca
accaataaaaatggatatgctatttcaacacaagtatcttcaggaaaata
taaaattaaggaattaaaagctcctaaaggttattcattgaatacagaaa
cttatgaaattacggcaaattgggtaactgctacagtcaagacaagtgct
aattcaaaaagtactacttatacatctgataaaaataaggcgacagataa
ttcagagcaagtaggatggttaaaaaatggtatattctattctatagata
gtagacctacaggaaatgatgttaaagaggcttatattgaatctactaag
gctttaactgatggaacaactttctcaaaatcgaatgaaggttcaggtac
agtattattagaaactgacatccctaacaccaagctaggtgaactc

SEQ ID NO: 268

KDDTAQLKTTNIEGGPTVTLYKIGEGVYNTNGDSFINFKYAEGVSLTETG
PTSQEITTIANGINTGKIKPFSTENVSISNGTATYNARGASVYIALLTGA
TDGRTYNPILLAASYNGEGNLVTKNIDSKSNYLYGQTSVAKSSLPSITKL
VTGTIDDVNKKTTSLGSVLSYSLTFELPSYTKEAVNKTVYVSDNMSEGLT
FNFNSLTVEWKKGMANITEDGSVMVENTKIGIAKEVNNGFNLSFIYDSLE
SISPNISYKAVVNNKAIVGEEGNPNKAEFFYSNNPTKGNTYDNLDKKPDK
GNGITSKEDSKIVYTYQIAFRKVDSVSKTPLIGAIFGVYDTSNKLIDIVT
TNKNGYAISTQVSSGKYKIKELKAPKGYSLNTETYEITANWVTATVKTSA
NSKSTTYTSDKNKATDNSEQVGWLKNGIFYSIDSRPTGNDVKEAYTESTK
ALTDGTTFSKSNEGSGTVLLETDIPNTKLGEL

[1011] M6 strain isolate ISS 3650 is a GAS AI-1 strain of bacteria. ISS3650_fimbrial is thought to be a fimbrial structural subunit of M6 strain isolate ISS 3650. An example of a nucleotide sequence encoding the ISS3650_fimbrial protein (SEQ ID NO: 269) and an ISS3650_fimbrial protein amino acid sequence (SEQ ID NO: 270) are set forth below.

SEQ ID NO: 269

gaatggaaaggtaagatggctaatattactgaagatggttcagtaatggt
agaaaatacaaaaatcggaatagctaaggaggttaataacggttttaatt
taagttttatttatgatagtttagaatctatatcaccaaatataagttat
aaagctgttgtaaacaataaagctattgttggtgaagagggtaatcctaa
taaagctgaattcttctattcaaataatccaacaaaaggtaatacatacg
ataatttagataagaagcctgataaagggaatggtattacatccaaagaa
gattctaaaattgtttatacttatcaaatagcgtttagaaaagttgatag
tgttagtaagaccccacttattggtgcaatttttggagtttatgatacta
gtaataaattaattgatattgttacaaccaataaaaatggatatgctatt
tcaacacaagtatcttcaggaaaatataaaattaaggaattaaaagctcc
taaaggttattcattgaatacagaaacttatgaaattacggcaaattggg
taactgctacagtcaagacaagtgctaattcaaaaagtactacttataca
tctgataaaaataaggcgacagataattcagagcaagtaggatggttaaa
aaatggtatattctattctatagatagtagacctacaggaaatgatgtta
aagaggcttatattgaatctactaaggctttaactgatggaacaactttc
tcaaaatcgaatgaaggttcaggtacagtattattagaaactgacatcc

SEQ ID NO: 270

EWKGKMANITEDGSVMVENTKIGIAKEVNNGFNLSFIYDSLESISPNISY
KAVVNNKAIVGEEGNPNKAEFFYSNNPTKGNTYDNLDKKPDKGNGITSKE
DSDIVYTYQIAFRKVDSVSKTPLIGAIFGVYDTSNKLIDIVTTNKNGYAI
STQVSSGKYKIKELKAPKGYSLNTETYEITANWVTATVKTSANSKSTTYT
SDKNKATDNSEQVGWLKNGIFYSIDSRPTGNDVKEAYIESTKALTDGTTF
SKSNEGSGTVLLETDI

[1012] M23 strain isolate DSM2071 is a GAS AI-1 strain of bacteria. DSM2071_fimbrial is thought to be a fimbrial structural subunit of M23 strain DSM2071. An example of a nucleotide sequence encoding the DSM2071_fimbrial protein (SEQ ID NO: 251) and a DSM2071_fimbrial protein amino acid sequence (SEQ ID NO: 252) are set forth below.

SEQ ID NO: 251

atgagagagaaaatattaatagcagcaaaaaaactaatgctagcttgttt
agctatcttagctgtagtagggcttggaatgacaagagtatcagctttat
caaaagatgataaggcggagttgaagataacaaatatcgaaggtaaaccg
accgtgacactgtataaaattggtgatggaaaatacagtgagcgagggga
ttcttttattggatttgagttaaagcaaggtgtggagctaaataaggcaa
aacctacatctcaagaaataaataaaatcgctaatggtattaataaaggt
agtgttaaggctgaagtagttaatataaaagaacatgctagtacaactta
tagttatacaacaactggtgcaggtatttacttggctatattgactggag
ctactgatggacgtgcctataatcctatcttactgacagcttcttacaat
gaggaaaatccacttaagggagggcagattgacgcaactagtcattatct
ttttggagaagaagcagttgctaaatctagccaaccaacaattagcaagt
caattacaaaatccacaaaagatggtgataaagatacagcatctgtaggt
gaaaaagttgattacaaattaactgttcagttaccaagttattcgaaaga
tgctatcaataaaacggtgtttatcactgacaaattgtctcagggactta
ctttccttccaaaaagtttaaagattatctggaatggtcaaacgttaaca
aaggtgaatgaagaatttaaagctggagataaggtaattgctcaacttaa
ggttgaaaataatggatttaatctgaactttaattatgataaccttgata
atcatgccccagaagttaactatagtgctctactaaatgaaaacgcagtt
gttggtaaaggtggtaatgacaataatgtagactattactattcaaataa
tccgaataaaggagagacccataaaacaactgagaagcctaaagagggtg
aaggtactggtatcactaaaaagacggataaaaaaaccgtctacacctat
cgtgtagcctttaagaaaacaggcaaagatcatgccccactagctggtgc
tgttttcggtatctattcagataaggaagcgaaacaattagtcgatattg
ttgtgacaaatgcacagggttatgcagcatcaagcgaagttgggaaaggg
acttattacattaaagaaattaaatcccctaagggttactctttaaatac
aaatatttatgaagtggaaacttcatgggaaaaagctacaacgacttcta
caactaatcgtttagagacaatttatacaacagatgataatcaaaagtct
ccaggaactaatacagttggttggttggaagatggtgtcttttacaaaga
aaatccaggtggtgatgctaaacttgcctatatcaaacaatcaacagagg
agacttctacaactatagaagtcaaagaaaatcaagctgaaggttcaggt
acggtattattagaaactgaaattcctaacaccaaattaggtgaattacc
ttcgacaggtagcattggtacttacctctttaaagctattggttcggctg
ctatgatcggtgcaattggtatttatattgttaaacgtcgtaaagcttaa

SEQ ID NO: 252

MREKILIAAKKLMLACLATLAVVGLGMTRVSALSKDDKAELKITNIEGKP
TVTLYKIGDGKYSERGDSFIGFELKQGVELNKAKPTSQEINKIANGINKG
SVKAEVVNIKEHASTTYSYTTTGAGIYLAILTGATDGRAYNPILLTASYN
EENPLKGGQIDATSHYLFGEEAVAKSSQPTISKSITKSTKDGDKDTASVG
EKVDYKLTVQLPSYSKDAINKTVFITDKLSQGLTFLPKSLKIIWNGQTLT
KVNEEFKAGDKVIAQLKVENNGFNLNFNYDNLDNHAPEVNYSALLNENAV
VGKGGNDNNVDYYYSNNPNKGETHKTTEKPKEGEGTGITKKTDKKTVYTY
RVAFKKTGKDHAPLAGAVFGIYSDKEAKQLVDIVVTNAQGYAASSEVGKG
TYYIKEIKSPKGYSLNTNIYEVETSWEKATTTSTTNRLETIYTTDDNQKS
PGTNTVGWLEDGVFYKENPGGDAKLAYIKQSTEETSTTIEVKENQAEGSG
TVLLETEIPNTKLGELPSTGSIGTYLFKAIGSAAMIGAIGIYIVKRRKA

[1013] GAS AI-2 sequences

[1014] As discussed above, a GAS AI-2 sequence is present in an M1 strain isolate (SF370). Examples of GAS AI-2 sequences from M1 strain isolate SF370 are set forth below.

[1015] Spy0124 is a rofA transcriptional regulator. An example of an amino acid sequence for

[1016] Spy0124 is set forth in SEQ ID NO:47.

SEQ ID NO: 47

MIEKYLESSIESKGQLIVLFFKTSYLPITEVAEKTGLTFLQLNHYCEELN
AFFPGSLSMTIQKRMISCQFTHPFKETYLYQLYASSNVLQLLAFLIKNGS
HSRPLTDPARSHFLSNSSAYRMREALIPLLRNFELKLSKNKIVGEEYRIR
YLIALLYSKFGIKVYDLTQQDKNTIHSFLSHSSTHLKTSPWLSESESFYD
ILLALSWKRHQFSVTIPQTRIFQQLKKLFVYDSLKKSSHDIIETYGQLNF
SAGDLDYLYLIYITANNSFASLQWTPEHIRQYCQLFEENDTFRLLLNPII
TLLPNLKEQKASLVKALMFFSKSFLFNLQHFIPETNLFVSPYYKGNQKLY
TSLKLIVEEWMAKLPGKRDLNHKHFHLFCHYVEQSLRNIQPPLVVVFVAS
NFINAHLLTDSFPRYFSDKSIDFHSYYLLQDNVYQIPDLKPDLVITHSQL
IPFVHHELTKGIAVAEISFDESILSIQELMYQVKEEKEQADLTKQLT

[1017] GAS 015 is also referred to as Cpa. It contains a sortase substrate motif VVXTG (SEQ ID NO: 135), shown in italics in SEQ ID NO: 48.

SEQ ID NO: 48

LRGEKMKKTRFPNKLNTLNTQRVLSKNSKRFTVTLVGVFLMIEALVTSMV
GAKTVFGLVESSTPNAINPDSSSEYRWYGYESYVRGHPYYKQFRVAHDLR
VNLEGSRSYQVYCFNLKKAFPLGSDSSVKKWYKKHDGISTKFEDYAMSPR
ITGDELNQKLRAVMYNGHPQNANGIMEGLEPLNAIRVTQEAVWYYSDNAP
ISNPDESFKRESESNLVSTSQLSLMRQALKQLIDPNLATKMPKQVPDDFQ
LSIFESEDKGDKYNKGYQNLLSGGLVPTKPPTPGDPPMPPNQPQTTSVLI
RKYAIGDYSKLLEGATLQLTGDNVNSFQARVFSSNDIGERIELSDGTYTL
TELNSPAGYSIAEPITFKVEAGKVYTIIDGKQIENPNKEIVEPYSVEAYN
DFEEFSVLTTQNYAKFYYAKNKNGSSQVVYCFNADLKSPPDSEDGGKTMT
PDFTTGEVKYTHIAGRDLFKYTVKPRDTDPDTFLKHIKKVIEKGYREKGQ
AIEYSGLTETQLRAATQLATYYFTDSAELDKDKLKDYHGFGDMNDSTLAV
AKILVEYAQDSNPPQLTDLDFFIPNNNKYQSLIGTQWHPEDLVDTIRMED
KKEVIPVTHNLTLRKTVTGLAGDRTKDFHFEIELKNNKQELLSQTVKTDK
TNLEFKDGKATINLKHGESLTLQGLPEGYSYLVKETDSEGYKVKVNSQEV
ANATVSKTGITSDETLAFENNKEPVVPTGVDQKINGYLALIVIAGISLGI
WGIHTIRIRKHD

[1018] GAS 015 contains an amino acid motif indicative of a cell wall anchor: SEQ ID NO: 182 VVPTG (shown in italics in SEQ ID NO: 48, above). In some recombinant host cell systems, it may be preferable to remove this motif to facilitate secretion of a recombinant GAS 015 protein from the host cell. Alternatively, in other recombinant host cell systems, it may be preferable to use the cell wall anchor motif to anchor the recombinantly expressed protein to the cell wall. The extracellular domain of the expressed protein may be cleaved during purification or the recombinant protein may be left attached to either inactivated host cells or cell membranes in the final composition.

[1019] A pilin motif, discussed above, containing a conserved lysine (K) residue has also been identified in GAS 015. The pilin motif sequence is underlined in SEQ ID NO: 48, below. Conserved lysine (K) residues are also marked in bold, at amino acid residue 243. The pilin sequence, in particular the conserved lysine residues, are thought to be important for the formation of oligomeric, pilus-like structures. Preferred fragments of GAS 015 include the conserved lysine residue. Preferably, fragments include the pilin sequence.

SEQ ID NO: 48

LRGEKMKKTRFPNKLNTLNTQRVLSKNSKRFTVTLVGVFLMIFALVTSMV
GAKTVFGLVESSTPNAINPDSSSEYRWYGYESYVRGHPYYKQFRVAHDLR
VNLEGSRSYQVYCFNLKKAFPLGSDSSVKKWYKKHDGISTKFEDYANSPR
ITGDELNQKLRAVMYNGHPQNANGIMEGLEPLNAIRVTQEAVWYYSDNAP
ISNPDESFKRESESNLVSTSQLSLMRQALKQLIDPNLATKMPKQVPDDFQ
LSIFESEDKGDKYNKGYQNLLSGGLVPTKPPTPGDPPMPPNQPQTTSVLI
RKYAIGDYSKLLEGATLQLTGDNVNSFQARVFSSNDIGERIELSDGTYTL
TELNSPAGYSIAEPITFKVEAGKVYTIIDGKQIENPNKETVEPYSVEAYN
DFEEFSVLTTQNYAKFYYAKNKNGSSQVVYCFNADLKSPPDSEDGGKTMT
PDFTTGEVKYTHIAGRDLFKYTVKPRDTDPDTFLKHIKKVIEKGYREKGQ
AIEYSGLTETQLRAATQLAIYYFTDSAELDKDKLKDYHGFGDMNDSTLAV
AKILVEYAQDSNPPQLTDLDFFIPNNNKYQSLIGTQWHPEDLVDTIRMED
KKEVIPVTHNLTLRKTVTGLAGDRTKDFHPEIELKNNKQELLSQTVKTDK
TNLEFKDGKATINLKHGESLTLQGLPEGYSYLVKETDSEGYKVKVNSQEV
ANATVSKTGTTSDETLAFENNKEPVVPTGVDQKINGYLALIVIAGISLGI
WGIHTIRIRKHD

[1020] An E box containing a conserved glutamic residue has been identified in GAS 015. The E-box motif is underlined in SEQ ID NO: 48, below. The conserved glutamic acid (E), at amino acid residue 352, is marked in bold. The E box motif, in particular the conserved glutamic acid residue, is thought to be important for the formation of oligomeric pilus-like structures of GAS 015. Preferred fragments of GAS 015 include the conserved glutamic acid residue. Preferably, fragments include the E box motif.

SEQ ID NO: 48

LRGEKMKKTRFPNKLNTLNTQRVLSKNSKRFTVTLVGVFLMIFALVTSMV
GAKTVFGLVESSTPNAINPDSSSEYRWYGYESYVRGHPYYDQFRVAHDLR
VNLEGSRSYQVYCFNLKKAFPLGSDSSVKKWYKKHDGISTKFEDYAMSPR
ITGDELNQKLRAVMYNGHPQNANGIMEGLEPLNAIRVTQEAVWYYSDNAP
ISNPDESFKRESESNLVSTSQLSLMRQALKQLIDPNLATKMPKQVPDDFQ
LSIFESEDKGDKYNKGYQNLLSGGLVPTKPPTPGDPPMPPNQPQTTSVLI
RKYAIGDYSKLLEGATLQLTGDNVNSFQARVFSSNDIGERIELSDGTYTL
TELNSPAGYSIAEPITFKVEAGKVYTIIDGKQIENPNKEIVEPYSVEAYN
DFEEFSVLTTQNYAKFYYAKNKNGSSQVVYCPNADLKSPPDSEDGGKTMT
PDFTTGEVKYTHIAGRDLFKYTVKPRDTDPDTFLKHIKKVIEKGYREKGQ
AIEYSGLTETQLRAATQLAIYYFTDSAELDKDKLKDYHGFGDMNDSTLAV
AKILVEYAQDSNPPQLTDLDFFIPNNNKYQSLIGTQWHPEDLVDIIRMED
KKEVIPVTHNLTLRKTVTGLAGDRTKDFHFEIELKNNKQELLSQTVKTDK
TNLEFKDGKATINLKHGESLTLQGLPEGYSYLVKETDSEGYKVKVNSQEV
ANATVSKTGITSDETLAFENNKEPVVPTGVDQKINGYLALIVIAGISLGI
WGIHTIRIRKHD

[1021] Spy0127 is a LepA putative signal peptidase. An example of an amino acid sequence for Spy0127 is set forth in SEQ ID NO: 49.

SEQ ID NO: 49

MIIKRNDMAPSVKAGDAILFYRLSQTYKVEEAVVYEDSKTSITKVGRIIA
QAGDEVDLTEQGELKINGHIQNEGLTFIKSREANYPYRIADNSYLTLNDY
YSQESENYLQDAIAKDAIKGTINTLIRLRNH

[1022] Spy0128 is thought to be a fibrial protein. It contains a sortase substrate motif EVXTG (SEQ ID NO: 136) shown in italics in SEQ ID NO: 50.

SEQ ID NO: 50

MKLRHLLLTGAALTSFAATTVHGETVVNGAKLTVTKNLDLVNSNALIPNT
DFTFKIEPDTTVNEDGNKFKGVALNTPMTKVTYTNSDKGGSNTKTAEFDF
SEVTFEKPGVYYYKVTEEKIDKVPGVSYDTTSYTVQVHVLWNEEQQKPVA
TYIVGYKEGSKVPIQFKNSLDSTTLTVKKKVSGTGGDRSKDFNFGLTLKA
NQYYKASEKVMIEKTTKGGQAPVQTEASIDQLYHFTLKDGESIKVTNLPV
GVDYVVTEDDYKSEKYTTNVEVSPQDGAVKNIAGNSTEQETSTDKDMTIT
FTNKKDFEVPTGVAMTVAPYIALGIVAVGGALYFVKKKNA

[1023] Spy0128 contains an amino acid motif indicative of a cell wall anchor: SEQ ID NO: 183 EVPTG (shown in italics in SEQ ID NO: 50, above). In some recombinant host cell systems, it may be preferable to remove this motif to facilitate secretion of a recombinant Spy0128 protein from the host cell. Alternatively, in other recombinant host cell systems, it may be preferable to use the cell wall anchor motif to anchor the recombinantly expressed protein to the cell wall. The extracellular domain of the expressed protein may be cleaved during purification or the recombinant protein may be left attached to either inactivated host cells or cell membranes in the final composition.

[1024] Two E boxes containing a conserved glutamic residue have been identified in Spy0128. The E-box motifs are underlined in SEQ ID NO: 50, below. The conserved glutamic acid (E) residues, at amino acid residues 271 and 290, are marked in bold. The E box motifs, in particular the conserved glutamic acid residues, are thought to be important for the formation of oligomeric pilus-like structures of Spy0128. Preferred fragments of Spy0128 include at least one conserved glutamic acid residue. Preferably, fragments include at least one E box motif.

SEQ ID NO: 50

MKLRHLLLTGAALTSFAATTVHGETVVNGAKLTVTKNLDLVNSNALIPNT
DFTFKIEPDTTVNEDGNKFKGVALNTPMTKVTYTNSDKGGSNTKTAEFDF
SEVTPEKPGVYYYKVTEEKIDKVPGVSYDTTSYTVQVHVLWNEEQQKPVA
TYIVGYKEGSKVPIQFKNSLDSTTLTVKKKVSGTGGDRSKDFNFGLTLKA
NQYYKASEKVMIEKTTKGGQAPVQTEASTDQLYHFTLKDGESIKVTNLPV
GVDYVVTEDDYKSEKYTTNVEVSPQDGAVKNIAGNSTEQETSTDKDMTIT
FTNKKDFEVPTGVAMTVAPYIALGIVAVGGALYFVKKKNA

[1025] Spy0129 is a srtC1 type sortase. An example of an amino acid sequence for Spy0129 is set forth in SEQ ID NO: 51.

SEQ ID NO: 51

MIVRLIKLLDKLINVIVLCFFFLCLLIAALGIYDALTVYQGANATNYQQY
KKKGVQFDDLLAINSDVMAWLTVKGTHIDYPIVQGENNLEYINKSVEGEY
SLSGSVFLDYRNKVTFEDKYSLIYAHHMAGNVMFGELPNFRKKSFFNKHK
EESIETKTKQKLKINIFACIQTDAFDSLLFNPIDVDISSKNEFLNHIKQK
SVQYREILTTNESRFVALSTCEDMTTDGRIIVIGQIE″

[1026] Spy0130 is referred to as a hypothetical protein. It contains a sortase substrate motif LPXTG (SEQ ID NO: 122), shown in italics in SEQ ID NO: 52.

SEQ ID NO: 52

MKKSILRILAIGYLLMSFCLLDSVEAENLTASINIEVINQVDVATNKQSS
DIDETFMPVIEALDKESPLPNSVTTSVKGNGKTSFEQLTPSEVGQYHYKI
HQLLGKNSQYHYDETVYEVVIYVLYNEQSGALETNLVSNKLGETEKSELI
FKQEYSEKTPEPHQPDTTEKEKPQKKRNGILPSTGEMVSYVSALGIVLVA
TITLYSIYKKLKTSK

[1027] Spy0130 contains an amino acid motif indicative of a cell wall anchor: SEQ ID NO: 131 LPSTG (shown in italics in SEQ ID NO: 52, above). In some recombinant host cell systems, it may be preferable to remove this motif to facilitate secretion of a recombinant Spy0130 protein from the host cell. Alternatively, in other recombinant host cell systems, it may be preferable to use the cell wall anchor motif to anchor the recombinantly expressed protein to the cell wall. The extracellular domain of the expressed protein may be cleaved during purification or the recombinant protein may be left attached to either inactivated host cells or cell membranes in the final composition.

[1028] Two E boxes containing conserved glutamic residues have been identified in Spy0130. The E-box motifs are underlined in SEQ ID NO: 52, below. The conserved glutamic acid (E) residues, at amino acid residues 118 and 148, are marked in bold. The E box motifs, in particular the conserved glutamic acid residues, are thought to be important for the formation of oligomeric pilus-like structures of Spy0130. Preferred fragments of Spy0130 include at least one conserved glutamic acid residue. Preferably, fragments include at least one E box motif.

SEQ ID NO:52

MKKSILRILAIGYLLMSFCLLDSVEAENLTASINIEVINQVDVATNKQSS
DTDETFMFVIEALDKESPLPNSVTTSVKGNGKTSFEQLTFSEVGQYHYKI
HQLLGKNSQYHYDETVYEVVIYVLYNEQSGALETNLVSNKLGETEKSELI
FKQEYSEKTPEPHQPDTTEKEKPQKKRNGILPSTGEMVSYVSALGIVLVA
TITLYSIYKKLKTSK

[1029] Spy0131 is referred to as a conserved hypothetical protein. An example of an amino acid sequence of Spy0131 is set forth in SEQ ID NO: 53

SEQ ID NO: 53

MTRTNYQKKRMTCPVETEDITYRRKKIKGRRQAILAQFEPELVHHELIGD
SCTCPDCHGTLTEIGSVVQRQELVFIPAQLKRINHVQHAYKCQTCSDNSL
SDKIIKAPVPKAPLAHSLGSASIIAHTVHQKFTLKVPNYRQEEDWNKLGL
SISRKEIANWHIKSSQYYFEPLYDLLRDILLSQEVIHADETSYRVLESDT
QLTYYWTFLSGKHEKKGITLYHHDKRRSGLVTQEVLGDYSGYVHCDMHGA
YRQLEHAKLVGCWAHVRRKFFEATPKQADKTSLGRKGLVYCDKLFALEAE
WCELPPQERLVKRKEILTPLMTTFFDWCREQVVLSGSKLGLAIAYSLKHE
RTFRTVLEDGHIVLSNNMAERAIKSLVMGRKNWLFSQSFEGAKAAAIIMS
LLETAKRHGLNSEKYISYLLDRLPNEETLAKREVLEAYLPWAKKVQTNCQ

[1030] Spy0133 is referred to as a conserved hypothetical protein. An example of an amino acid sequence of Spy0133 is set forth in SEQ ID NO: 54.

SEQ ID NO: 54

MTIRLNDLGQVYLVCGKTDMRQGIDSLAYLVKSQHELDLFSGAVYLFCGG
RTRDRFKALYWDGQGFWLLYKRFENGKLAWPRNRDEVKCLTAVQVDWLMK
GFFISPNIKISKSHDFY

[1031] Spy0135 is a SrtB type sortase. It is also referred to as a putative fibria-associated protein. An example of an amino acid sequence of Spy0135 is set forth in SEQ ID NO: 55.

SEQ ID NO: 55

MECYRDRQLLSTYHKQVTQKKPSEMEEVWQKAKAYNARLGIQPVPDAFSF
RDGIHDKNYESLLQIENNDIMGYVEVPSIKVTLPIYHYTTDEVLTKGAGH
LFGSALPVGGDGTHTVISAHRGLPSAEMETNLNLVKKGDTFYFRVLNKVL
AYKVDQILTVEPDQVTSLSGVMGKDYATLVTCTPYGVNTKRLLVRGHRIA
YHYKKYQQAKKAMKLVDKSRMWAEVVCAAFGVVIAIILVFMYSRVSAKKS
K

[1032] GAS AI-3 Sequences

[1033] As discussed above, a GAS AI-3 sequence is present in a M3, M18 and M5 strain isolates. Examples of GAS AI-3 sequences from M3 strain isolate MGAS315 are set forth below.

[1034] SpyM30097 is as a negative transcriptional regulator (Nra). An example of an amino acid sequence of SpyM30097 is set forth in SEQ ID NO: 56.

SEQ ID NO: 56

MPYVKKKKDSFLVETYLEQSIRDKSELVLLLFKSPTIIFSHVAKQTGLTA
VQLKYYCKELDDFFGNNLDTTIKKGKIICCFVKPVKEFYLHQLYDTSTIL
KLLVFFIKNGTSSQPLIKFSKKYFLSSSSAYRLRESLIKLLREFGLRVSK
NTIVGEEYRIRYLIAMLYSKFGIVIYPLDHLDNQIIYRFLSQSATNLRTS
PWLEEPFSFYNMLLALSWKRHQFAVSIPQTRIFRQLKKLFIYDCLTRSSR
QVIENAFSLTFSQGDLEYLFLIYITTNNSFASLQWTPQHIETCCHIFEKN
DTFRLLLEPILKRLPQLNHSKQDLIKALMYFSKSFLFNLQHFVIEIPSFS
LPTYTGNSNLYKALKNIVNQWLAQLPGKRHLNEKHLQLFCSHIEQILKNK
QPALTVVLISSNFINAKLLTDTIPRYPSDKGIHFYSFYLLRDDIYQIPSL
KPDLVITHSRLIPFVKNDLVKGVTVAEFSFDNPDYSIASIQNLTYQLKDK
KYQDFLNEQLQ

[1035] SpyM30098 is thought to be a collagen binding protein (Cpb). It contains a sortase substrate motif VPXTG (SEQ ID NO: 137) shown in italics in SEQ ID NO: 57.

SEQ ID NO: 57

MQKRDKTNYGSANNKRRQTTIGLLKVFLTFVALIGIVGFSIRAFGAEEQS
VPNKQSSVQDYPWYGYDSYSKGYPDYSPLKTYHNLKVNLDGSKEYQAYCF
NLTKHFPSKSDSVRSQWYKKLEGTNENFIKLADKPRIEDGQLQQNILRIL
YNGYPNDRNGIMKGIDPLNAILVTQNAIWYYTDSSYISDTSKAFQQEETD
LKLDSQQLQLMRNALKRLINPKEVESLPNQVPANYQLSIFQSSDKTFQNL
LSAEYVPDTPPKPGEEPPAKTEKTSVIIRKYAEGDYSKLLEGATLKLAQI
EGSGFQEKIFDSNKSGEKVELPNGTYVLSELKPPQGYGVATPITFKVAAE
KVLIKNKEGQFVENQNKEIAEPYSVTAFNDEEEIGYLSDFNNYGKFYYAK
NTNGTNQVVYCFNADLHSPPDSYDHGANIDPDVSESKEIKYTHVSGYDLY
KYAATPRDKDADFFLKHIKKILDKGYKKKGDTYKTLTEAQFRAATQLAIY
YYTDSADLTTLKTYNDNKGYHGFDKLDDATLAVVHELITYAEDVTLPMTQ
NLDEFVPNSSRYQALIGTQYHPNELIDVISMEDKQAPIIPITHKLTISKT
VTGTIADKKKEFNFEIHLKSSDGQAISGTYPTNSGELTVTDGKATFTLKD
GESLIVEGLPSGYSYEITETGASDYEVSVNGKNAPDGKATKASVKEDETV
AFENRKDLVPPTGLTTDGAIYLWLLLLVPFGLLVWLFGRKGTKK

[1036] SpyM30098 contains an amino acid motif indicative of a cell wall anchor: SEQ ID NO: 184 VPPTG (shown in italics in SEQ ID NO: 57, above). In some recombinant host cell systems, it may be preferable to remove this motif to facilitate secretion of a recombinant SpyM30098 protein from the host cell. Alternatively, in other recombinant host cell systems, it may be preferable to use the cell wall anchor motif to anchor the recombinantly expressed protein to the cell wall. The extracellular domain of the expressed protein may be cleaved during purification or the recombinant protein may be left attached to either inactivated host cells or cell membranes in the final composition.

[1037] A pilin motif, discussed above, containing a conserved lysine (K) residue has also been identified in SpyM30098. The pilin motif sequence is underlined in SEQ ID NO: 57, below. Conserved lysine (K) residues are also marked in bold, at amino acid residues 262 and 270. The pilin sequence, in particular the conserved lysine residues, are thought to be important for the formation of oligomeric, pilus-like structures. Preferred fragments of SpyM30098 include at least one conserved lysine residue. Preferably, fragments include the pilin sequence.

SEQ ID NO: 57

MQKRDKTNYGSANNKRRQTTIGLLKVFLTFVALIGIVGFSIRAFGAEEQS
VPNKQSSVQDYPWYGYDSYSKGYPDYSPLKTYHNLKVNLDGSKEYQAYCF
NLTKHFPSKSDSVRSQWYKKLEGTNENFIKLADKPRIEDGQLQQNILRIL
YNGYPNDRNGIMKGTDPLNATLVTQNAIWYYTDSSYISDTSKAFQQEETD
LKLDSQQLQLMRNALKRLINPKEVESLPNQVPANYQLSIFQSSDKTFQNL
LSAEYVPDTPPKPGEEPPAKTEKTSVIIRKYAEGDYSKLLEGATLKLAQI
EGSGFQEKIFDSNKSGEKVELPNGTYVLSELKPPQGYGVATPITFKVAAE
KVLIKNKEGQFVENQNKEIAEPYSVTAFNDFEEIGYLSDFNNYGKFYYAK
NTNGTNQVVYCFNADLHSPPDSYDHGANIDPDVSESKEIKYTHVSGYDLY
KYAATPRDKDADFFLKHIKKILDKGYKKKGDTYKTLTEAQFRAATQLAIY
YYTDSADLTTLKTYNDNKGYHGFDKLDDATLAVVHELITYAEDVTLPMTQ
NLDFFVPNSSRYQALIGTQYHPNELIDVISMEDKQAPIIPITHKLTISKT
VTGTIADKKKEFNFEIHLKSSDGQAISGTYPTNSGELTVTDGKATFTLKD
GESLIVEGLPSGYSYEITETGASDYEVSVNGKNAPDGKATKASVKEDETV
AFENRKDLVPPTGLTTDGAIYLWLLLLVPFGLLVWLFGRKGTKK

[1038] An E box containing a conserved glutamic residue has been identified in SpyM30098. The E-box motif is underlined in SEQ ID NO: 57, below. The conserved glutamic acid (E), at amino acid residue 330, is marked in bold. The E box motif, in particular the conserved glutamic acid residue, is thought to be important for the formation of oligomeric pilus-like structures of SpyM30098. Preferred fragments of SpyM30098 include the conserved glutamic acid residue. Preferably, fragments include the E box motif.

SEQ ID NO: 57

MQKRDKTNYGSANNKRRQTTIGLLKVFLTFVALIGIVGFSIRAFGAEEQS
VPNKQSSVQDYPWYGYDSYSKGYPDYSPLKTYHNLKVNLDGSKEYQAYCF
NLTKHFPSKSDSVRSQWYKKLEGTNENFIKLADKPRIEDGQLQQNILRIL
YNGYPNDRNGIMKGTDPLNATLVTQNAIWYYTDSSYISDTSKAFQQEETD
LKLDSQQLQLMRNALKRLINPKEVESLPNQVPANYQLSIFQSSDKTFQNL
LSAEYVPDTPPKPGEEPPAKTEKTSVIIRKYAEGDYSKLLEGATLKLAQI
EGSGFQEKIFDSNKSGEKVELPNGTYVLSELKPPQGYGVATPITFKVAAE
KVLIKNKEGQFVENQNKEIAEPYSVTAFNDFEEIGYLSDFNNYGKFYYAK
NTNGTNQVVYCFNADLHSPPDSYDHGANIDPDVSESKEIKYTHVSGYDLY
KYAATPRDKDADFFLKHIKKILDKGYKKKGDTYKTLTEAQFRAATQLAIY
YYTDSADLTTLKTYNDNKGYHGFDKLDDATLAVVHELITYAEDVTLPMTQ
NLDFFVPNSSRYQALIGTQYHPNELIDVISMEDKQAPIIPITHKLTISKT
VTGTIADKKKEFNFEIHLKSSDGQAISGTYPTNSGELTVTDGKATFTLKD
GESLIVEGLPSGYSYEITETGASDYEVSVNGKNAPDGKATKASVKEDETV
AFENRKDLVPPTGLTTDGAIYLWLLLLVPFGLLVWLFGRKGTKK

[1039] SpyM30099 is referred to as LepA. An example of an amino acid sequence of SpyM30099 is set forth in SEQ ID) NO: 58.

SEQ ID NO: 58

MTNYLNRLNENPLLKAFIRLVLKISTIGFLGYILFQYVFGVMIVNTNQMS
PAVSAGDGVLYYRLTDRYHINDVVVYEVDDTLKVGRIAAQAGDVENFTQE
GGLLINGHPPEKEVPYLTYPHSSGPNFPYKVPTGTYFILNDYREERLDSR
YYGALPINQIKGKISTLLRVRGI

[1040] SpyM30100 is thought to be a fimbrial protein. An example of an amino acid sequence of SpyM30100 is set forth in SEQ ID NO: 59.

SEQ ID NO: 59

MKKNKLLLATAILATALGTASLNQNVKAETAGVSENAKLIVKKTFDSYTD
NEVLMPKADYTFKVEADSTASGKTKDGLEIKPGIVNGLTEQIISYTNTDK
PDSKVKSTEFDFSKVVFPGIGVYRYTVSEKQGDVEGITYDTKKWTVDVYV
GNKEGGGFEPKFIVSKEQGTDVKKPVNFNNSFATTSLKVKKNVSGNTGEL
QKEFDFTLTLNESTNFKKDQIVSLQKGNEKFEVKIGTPYKFKLKNGESIQ
LDKLPVGITYKVNEMEANKDGYKTTASLKEGDGQSKMYQLDMEQKTDESA
DEIVVTNKRDTQVPTGVVGTLAPFAVLSIVAIGGVIYITKRKKA

[1041] SpyM30100 contains an amino acid motif indicative of a cell wall anchor: SEQ ID NO: 140 QVPTG (shown in italics in SEQ ID NO: 59, above). In some recombinant host cell systems, it may be preferable to remove this motif to facilitate secretion of a recombinant SpyM30100 protein from the host cell. Alternatively, in other recombinant host cell systems, it may be preferable to use the cell wall anchor motif to anchor the recombinantly expressed protein to the cell wall. The extracellular domain of the expressed protein may be cleaved during purification or the recombinant protein may be left attached to either inactivated host cells or cell membranes in the final composition.

[1042] Two pilin motifs, discussed above, containing conserved lysine (K) residues have also been identified in SpyM30100. The pilin motif sequences are underlined in SEQ ID NO: 59, below. Conserved lysine (K) residues are also marked in bold, at amino acid residues 57 and 63 and at amino acid residues 161 and 166. The pilin sequences, in particular the conserved lysine residues, are thought to be important for the formation of oligomeric, pilus-like structures. Preferred fragments of SpyM30100 include at least one conserved lysine residue. Preferably, fragments include at least one pilin sequence.

SEQ ID NO: 59

MKKNKLLLATAILATALGTASLNQNVKAETAGVSENAKLIVKKTFDSYTD
NEVLMPKADYTFKVEADSTASGKTKDGLEIKPGIVNGLTEQIISYTNTDK
PDSKVKSTEFDFSKVVFPGIGVYRYTVSEKQGDVEGITYDTKKWTVDVYV
GNKEGGGFEPKFIVSKEQGTDVKKPVNFNNSFATTSLKVKKNVSGNTGEL
QKEFDFTLTLNESTNFKKDQIVSLQKGNEKFEVKIGTPYKFKLKNGESIQ
LDKLPVGITYKVNEMEANKDGYKTTASLKEGDGQSKMYQLDMEQKTDESA
DEIVVTNKRDTQVPTGVVGTLAPFAVLSIVAIGGVIYITKRKKA

[1043] Two E boxes, each containing a conserved glutamic residue, have been identified in SpyM30100. The E-box motifs are underlined in SEQ ID NO: 59, below. The conserved glutamic acid (E) residues, at amino acid residues 232 and 264, are marked in bold. The E box motifs, in particular the conserved glutamic acid residues, are thought to be important for the formation of oligomeric pilus-like structures of SpyM30100. Preferred fragments of SpyM30100 include at least one conserved glutamic acid residue. Preferably, fragments include at least one E box motif.

SEQ ID NO: 59

MKKNKLLLATAILATALGTASLNQNVKAETAGVSENAKLIVKKTFDSYTD
NEVLMPKADYTFKVEADSTASGKTKDGLEIKPGIVNGLTEQIISYTNTDK
PDSKVKSTEFDFSKVVFPGIGVYRYTVSEKQGDVEGITYDTKKWTVDVYV
GNKEGGGFEPKFIVSKEQGTDVKKPVNFNNSFATTSLKVKKNVSGNTGEL
QKEFDFTLTLNESTNFKKDQIVSLQKGNEKFEVKIGTPYKFKLKNGESIQ
LDKLPVGITYKVNEMEANKDGYKTTASLKEGDGQSKMYQLDMEQKTDESA
DEIVVTNKRDTQVPTGVVGTLAPFAVLSIVAIGGVIYITKRKKA

[1044] SpyM30101 is a SrtC2 type sortase. An example of an amino acid sequence of SpyM30101 is set forth in SEQ ID NO: 60.

SEQ ID NO: 60

MTIVQVINKAIDTLILIFCLVVLFLAGFGLWDSYHLYQQADASNPKKFKT
AQQQPKFEDLLALNEDVIGWLNIPGTHIDYPLVQGKTNLEYINKAVDGSV
ANSGSLFLDTRNHNDFTDDYSLIYGHHMAGNAMFGEIPKFLKKDFPSKHN
KATIETKERKKLTVTIFACLKTDAFNQLVFNPNAITNQDQQRQLVDYISK
RSKQFKPVKLKHHTKFVAFSTCENFSTDNRVIVVGTTQE

[1045] SpyM30102 is referred to as a hypothetical protein. An example of an amino acid sequence of SpyM30102 is set forth in SEQ ID NO: 61.

SEQ ID NO: 61

MILTMLAFNQTVLAKDSTVQTSISVENVLERAGDSTPFSIALESIDAMKT
IEEITIAGSGKASFSPLTFTTVGQYTYRVYQKPSQNKDYQASTTVFDVLV
YVTYDEDGTLVAKVISRRAGDEEKSAITFKPKWLVKPIPPRQPNIPKTPL
PLAGEVKSLLGILSIVLLGLLVLLYVKKLKSRL

[1046] SpyM30102 contains an amino acid motif indicative of a cell wall anchor: SEQ ID NO: 185 LPLAG (shown in italics in SEQ ID NO: 61, above). In some recombinant host cell systems, it may be preferable to remove this motif to facilitate secretion of a recombinant SpyM30102 protein from the host cell. Alternatively, in other recombinant host cell systems, it may be preferable to use the cell wall anchor motif to anchor the recombinantly expressed protein to the cell wall. The extracellular domain of the expressed protein may be cleaved during purification or the recombinant protein may be left attached to either inactivated host cells or cell membranes in the final composition.

[1047] A pilin motif, discussed above, containing a conserved lysine (K) residue has also been identified in SpyM30102. The pilin motif sequence is underlined in SEQ ID NO: 61, below. The conserved lysine (K) residue is also marked in bold, at amino acid residue 132. The pilin sequence, in particular the conserved lysine residues, are thought to be important for the formation of oligomeric, pilus-like structures. Preferred fragments of SpyM30102 include the conserved lysine residue. Preferably, fragments include the pilin sequence.

SEQ ID NO: 61

MILTMLAFNQTVLAKDSTVQTSISVENVLERAGDSTPFSIALESIDAMKT
IEEITIAGSGKASFSPLTFTTVGQYTYRVYQKPSQNKDYQADTTVFDVLV
YVTYDEDGTLVAKVISRRAGDEEKSAITFKPKWLVKPIPPRQPNIPKTPL
PLAGEVKSLLGILSIVLLGLLVLLYVKKLKSRL

[1048] Two E boxes containing conserved glutamic residues have been identified in SpyM30102. The E-box motifs are underlined in SEQ ID NO: 61, below. The conserved glutamic acid (E) residues, at amino acid residues 52 and 122, are marked in bold. The E box motifs, in particular the conserved glutamic acid residues, are thought to be important for the formation of oligomeric pilus-like structures of SpyM30102. Preferred fragments of SpyM30102 include at least one conserved lysine residue. Preferably, fragments include at least one pilin sequence.

SEQ ID NO: 61

MILTMLAFNQTVLAKDSTVQTSISVENVLERAGDSTPFSIALESIDAMKT
IEEITIAGSGKASFSPLTFTTVGQYTYRVYQKPSQNKDYQASTTVFDVLV
YVTYDEDGTLVAKVISRRAGDEEKSAITFKPKWLVKPIPPRQPNIPKTPL
PLAGEVKSLLGILSIVLLGLLVLLYVKKLKSRL

[1049] SpyM30103 is referred to as a putative multiple sugar metabolism regulator. An example of an amino acid sequence for SpyM3103 is set forth in SEQ ID NO: 62.

SEQ ID NO: 62

MVRFDLKHVQTLHSLSQLPISVMSQDKALIQVYGNDDYLLCYYQFLKHLA
IPQAAQDVIFYEGLFEESFMIFPLCHYIIAIGPGYPYSLNKDYQEQLANN
CLKHSSHRSKEELLSYMALVPHFPINNVRNLLIAIDAFFDTQFETTCQQT
IHQLLQHSKQMTADPDIIHRLKHISKASSQLPPVLEHLNHTMDLVKLGNP
QLLKQETNRIPLSSITSSSISALRAEKNLTVIYLTRLLEFSFVENTDVAK
HYSLVKYYMALNEEASDLLKVLRIRCAAIIHFSESLTNKSISDKRQMYNS
VLHYVDSHLYSKLKVSDIAKRLYVSESHLRSVFKKYSNVSLQHYILSTKI
KEAQLLLKRGIPVGEVAKSLYFYDTTHFHKIFKKYTGISSKDYLAKYRDN
I

[1050] SpyM30104 is thought to be a F2 like fibronectic binding protein. An example of an amino acid sequence for SpyM30104 is set forth in SEQ ID NO: 63.

SEQ ID NO: 63

MSSSDEETLKQYASKYTSNRRGDTSGNLKKQIAKVLTEGYPTNKSDWLNG
LTENEKIEVTQDAIWYFTETTVPADRSYTNRNVNSQKMKEVYQKLIDTTD
IDKYEDVQFDLFVPQDTNLQAVISVEPVIESLPWTSLKPIAQKDITAKKI
WVDAPKEKPIIYFKLYRQLPGEKEVAVDDAELKQINSEGQQEISVTWTNQ
LVTDEKGMAYIYSVKEVDKNGELLEPKDYIKKEDGLTVTNTYVKPTSGHY
DIEVTFGNGHIDTTEDTTPDIVSGENQMKQIEGEDSKPIDEVTENNLIEF
GKNTMPGEEDGTNSNKYEEVEDSRPVDTLSGLSSEQGQSGDMTIEEDSAT
HIKFSKRDIDGKELAGATMELRDSSGKTISTWISDGQVKDFYLMPGKYTF
VETAAPDGYEVATAITFTVNEQGQVTVNGKATKGKAHIVMVDAYKPTKGS
GQVIDIEEKLPDEQGHSGSTTEIEDSKSSDVIIGGQGEVVDTTEDTQSGM
TGHSGSTTEIEDSKSSDVIIGGQGEVVDTTEDTQSGMTGHSGSTTKIEDS
KSSDVIVGGQGQIVETTEDTQTGMHGDSGRKTEVEDTKLVQSFHEDNKEP
ESNSEIPKKDKSKSNTSLPATGEKQHNKFFWMVTSCSLISSVFVISLKSK
KRLSSC

[1051] SpyM30104 contains an amino acid motif indicative of a cell wall anchor: SEQ ID NO: 180 LPATG (shown in italics in SEQ ID NO: 63, above). In some recombinant host cell systems, it may be preferable to remove this motif to facilitate secretion of a recombinant SpyM30104 protein from the host cell. Alternatively, in other recombinant host cell systems, it may be preferable to use the cell wall anchor motif to anchor the recombinantly expressed protein to the cell wall. The extracellular domain of the expressed protein may be cleaved during purification or the recombinant protein may be left attached to either inactivated host cells or cell membranes in the final composition.

[1052] Two pilin motifs, discussed above, containing conserved lysine (K) residues have also been identified in SpyM30104. The pilin motif sequences are underlined in SEQ ID NO: 63, below. Conserved lysine (K) residues are also marked in bold, at amino acid residues 156 and 227. The pilin sequences, in particular the conserved lysine residues, are thought to be important for the formation of oligomeric, pilus-like structures. Preferred fragments of SpyM30104 include at least one conserved lysine residue. Preferably, fragments include at least one pilin sequence.

SEQ ID NO: 63

MSSSDEETLKQYASKYTSNRRGDTSGNLKKQIAKVLTEGYPTNKSDWLNG
LTENEKIEVTQDAIWYFTETTVPADRSYTNRNVNSQKMKEVYQKLIDTTD
IDKYEDVQFDLFVPQDTNLQAVISVEPVIESLPWTSLKPIAQKDITAKKI
WVDAPKEKPIIYFKLYRQLPGEKEVAVDDAELKQINSEGQQEISVTWTNQ
LVTDEKGMAYIYSVKEVDKNGELLEPKDYIKKEDGLTVTNTYVKPTSGHY
DIEVTFGNGHIDTTEDTTPDIVSGENQMKQIEGEDSKPIDEVTENNLIEF
GKNTMPGEEDGTNSNKYEEVEDSRPVDTLSGLSSEQGQSGDMTIEEDSAT
HIKFSKRDIDGKELAGATMELRDSSGKTISTWISDGQVKDFYLMPGKYTF
VETAAPDGYEVATAITFTVNEQGQVTVNGKATKGKAHIVMVDAYKPTKGS
GQVIDIEEKLPDEQGHSGSTTEIEDSKSSDVIIGGQGEVVDTTEDTQSGM
TGHSGSTTEIEDSKSSDVIIGGQGEVVDTTEDTQSGMTGHSGSTTKIEDS
KSSDVIVGGQGQIVETTEDTQTGMHGDSGRKTEVEDTKLVQSFHEDNKEP
ESNSEIPKKDKSKSNTSLPATGEKQHNKFFWMVTSCSLISSVFVISLKSK
KRLSSC

[1053] An E box containing a conserved glutamic residue has been identified in SpyM30104. The E-box motif is underlined in SEQ ID NO: 63, below. The conserved glutamic acid (E), at amino acid residue 402, is marked in bold. The E box motif, in particular the conserved glutamic acid residue, is thought to be important for the formation of oligomeric pilus-like structures of SpyM30104. Preferred fragments of SpyM30104 include the conserved glutamic acid residue. Preferably, fragments include the E box motif.

SEQ ID NO: 63

MSSSDEETLKQYASKYTSNRRGDTSGNLKKQIAKVLTEGYPTNKSDWLNG
LTENEKIEVTQDAIWYFTETTVPADRSYTNRNVNSQKMKEVYQKLIDTTD
IDKYEDVQFDLFVPQDTNLQAVISVEPVIESLPWTSLKPIAQKDITAKKI
WVDAPKEKPIIYFKLYRQLPGEKEVAVDDAELKQINSEGQQEISVTWTNQ
LVTDEKGMAYIYSVKEVDKNGELLEPKDYIKKEDGLTVTNTYVKPTSGHY
DIEVTFGNGHIDITEDTTPDIVSGENQMKQIEGEDSKPIDEVTENNLIEF
GKNTMPGEEDGTNSNKYEEVEDSRPVDTLSGLSSEQGQSGDMTIEEDSAT
HIKFSKRDIDGKELAGATMELRDSSGKTISTWISDGQVKDFYLMPGKYTF
VETAAPDGYEVATAITFTVNEQGQVTVNGKATKGDAHIVMVDAYKPTKGS
GQVIDTEEKLPDEQGHSGSTTEIEDSKSSDVIIGGQGEVVDTTEDTQSGM
TGHSGSTTEIEDSKSSDVIIGGQGEVVDTTEDTQSGMTGHSGSTTKIEDS
KSSDVIVGGQGQIVETTEDTQTGMHGDSGRKTEVEDTKLVQSFHFDNKEP
ESNSEIPKKDKSKSNTSLPATGEKQHNKFFWMVTSCSLISSVFVISLKSK
KRLSSC

[1054] Examples of GAS AI-3 sequences from M3 strain isolate SSI-1 are set forth below.

[1055] Sps0099 is a negative transcriptional regulator (Nra). An example of an amino acid sequence for Sps0099 is set forth in SEQ ID NO: 64.

SEQ ID NO: 64

MPYVKKKKDSPLVETYLEQSIRDKSELVLLLFKSPTIIFSHVAKQTGLTA
VQLKYYCKELDDFFGNNLDITIKKGKIICCFVKPVKEFYLHQLYDTSTIL
KLLVFFIKNGTSSQPLIKFSKKYFLSSSSAYRLRESLIKLLREFGLRVSK
NTIVGEEYRIRYLIAMLYSKFGIVIYPLDHLDNQIIYRFLSQSATNLRTS
PWLEEPFSFYNMLLALSWKRHQFAVSIPQTRIFRQLKKLFIYDCLTRSSR
QVIENAFSLTESQGDLEYLFLIYITTNNSFASLQWTPQHIETCCHIFEKN
DTFRLLLEPILKRLPQLNHSKQDLIKALMYFSKSFLFNLQHFVIEIPSFS
LPTYTGNSNLYKALKNIVNQWLAQLPGKRHLNEKHLQLFCSHIEQILKNK
QPALTVVLTSSNFINAKLLTDTIPRYFSDKGIHFYSFYLLRDDIYQIPSL
KPDLVTTHSRLIPFVKNDLVKGVTVAEFSFDNPDYSIASIQNLIYQLKDK
KYQDFLNEQLQ

[1056] Sps0100 is thought to be a collagen binding protein (Cbp). It contains a sortase substrate motif VPXTG shown in italics in SEQ ID NO: 65.

SEQ ID NO: 65

MQKRDKTNYGSANNKRRQTTIGLLKVFLTFVALIGIVGFSIRAFGAEEQS
VPNKQSSVQDYPWYGYDSYSKGYPDYSPLKTYHNLKVNLDGSKEYQAYCF
NLTKHFPSKSDSVRSQWYKKLEGTNENFIKLADKPRIEDGQLQQNILRIL
YNGYPNDRNGIMKGIDPLNAILVTQNAIWYYTDSSYISDTSKAFQQEETD
LKLDSQQLQLMRNALKRLINPKEVESLPNQVPANYQLSIFQSSDKTFQNL
LSAEYVPDTPPKPGEEPPAKTEKTSVIIRKYAEGDYSKLLEGATLKLAQI
EGSGFQEKIFDSNKSGEKVELPNGTYVLSELKPPQGYGVATPITFKVAAE
KVLIKNKEGQFVENQNKETAEPYSVTAFNDFEEIGYLSDFNNYGKFYYAK
NTNGTNQVVYCFNADLHSPPDSYDHGANIDPDVSESKEIKYTHVSGYDLY
KYAATPRDKDADFFLKHIKKILDKGYKKKGDTYKTLTEAQFRAATQLAIY
YYTDSADLTTLKTYNDNKGYHGFDKLDDATLAVVHELITYAEDVTLPMTQ
NLDFFVPNSSRYQALIGTQYHPNELIDVISMEDKQAPIIPITHKLTISKT
VTGTIADKKKEFNFEIHLKSSDGQAISGTYPTNSGELTVTDGKATFTLKD
GESLIVEGLPSGYSYEITETGASDYEVSVNGKNAPDGKATKASVKEDETV
AFENRKDLVPPTGLTTDGAIYLWLLLLVPFGLLVWLFGRKGTKK

[1057] Sps0101 is referred to as a LepA protein. An example of an amino acid sequence of Sps0101 is set forth as SEQ ID NO: 66

SEQ ID NO: 66

MTNYLNRLNENPLLKAFIRLVLKISIIGFLGYILFQYVFGVMIVNTNQMS
PAVSAGDGVLYYRLTDRYHINDVVVYEVDDTLKVGRIAAQAGDEVNFTQE
GGLLINGHPPEKEVPYLTYPHSSGPNFPYKVPTGTYFILNDYREERLDSR
YYGALPINQIKGKISTLLRVRGI

[1058] Sps0102 is thought to be a fimbrial protein. It contains a sortase substrate motif QVXTG shown in italics in SEQ ID NO: 67.

SEQ ID NO: 67

MEREKMKKNKLLLATAILATALGTASLNQNVKAETAGVSENAKLIVKKTF
DSYTDNEVLMPKADYTFKVEADSTASGKTKDGLEIKPGIVNGLTEQIISY
TNTDKPDSKVKSTEFDFSKVVFPGIGVYRYTVSEKQGDVEGITYDTKKWT
VDVYVGNKEGGGFEPKFIVSKEQGTDVKKPVNFNNSFATTSLKVKKNVSG
NTGELQKEFDFTLTLNESTNFKKDQIVSLQKGNEKFEVKIGTPYKFKLKN
GESIQLDKLPVGITYKVNEMEANKDGYKTTASLKEGDGQSKMYQLDMEQK
TDESADEIVVTNKRDTQVPTGVVGTLAPFAVLSIVAIGGVIYITKRKKA

[1059] Sps0103 is a SrtC2 type sortase. An example of Sps0103 is set forth in SEQ ID NO: 68.

SEQ ID NO: 68

MVMTIVQVINKATDTLILTFGLVVLFLAGFGLWDSYHLYQQADASNFKKF
KTAQQQPKFEDLLALNEDVIGWLNIPGTHIDYPLVQGKTNLEYINKAVDG
SVAMSGSLFLDTRNHNDFTDDYSLTYGHHMAGNAMFGEIPKFLKKDFFSK
HNKAIIETKERKKLTVTIFACLKTDAFNQLVFNPNAITNQDQQRQLVDYI
SKRSKQFKPVKLKHHTKFVAFSTCENFSTDNRVTVVGTIQE

[1060] Sps0104 is referred to as a hypothetical protein. It contains a sortase substrate motif LPXAG shown in italics in SEQ ID NO: 69.

SEQ ID NO: 69

MLFSVVMILTMLAFNQTVLAKDSTVQTSISVENVLERAGDSTPFSIALES
IDAMKTIEEITIAGSGKASFSPLTFTTVGQYTYRVYQKPSQNKDYQADTT
VFDVLVYVTYDEDGTLVAKVISRRAGDEEKSAITFKPKWLVKPIPPRQPN
IPKTPLPLAGEVKSLLGILSIVLLGLLVLLYVKKLKSRL

[1061] Sps0105 is referred to as a putative multiple sugar metabolism regulator. An example of Sps0105 is set forth in SEQ ID NO: 70.

SEQ ID NO: 70

MALVPHFPINNVRNLLIAIDAFFDTQFETTCQQTIHQLLQHSKQMTADPD
ITHRLKHISKASSQLPPVLEHLNHIMDLVKLGNPQLLKQEINRIPLSSIT
SSSISALRAEKNLTVIYLTRLLEPSFVENTDVAKHYSLVKYYMALNEEAS
DLLKVLRIRCAAIIHFSESLTNKSISDKRQMYNSVLHYVDSHLYSKLKVS
DIAKRLYVSESHLRSVEKKYSNVSLQHYTLSTKIKEAQLLLKRGIPVGEV
AKSLYFYDTTHFHKIFKKYTGISSKDYLAKYRDNI

[1062] Sps0106 is thought to be a F2 like fibronectic binding protein. It contains a sortase substrate LPXTG (SEQ ID NO: 122) shown in italics in SEQ ID NO: 71.

SEQ ID NO: 71

MTQKNSYKLSFLLSLTGFILGLLLVFIGLSGVSVGHAETRNGANKQGAFE
IKKNKSQEEYNYEVYDNRNILQDGEHKLEIKRVDGTGKTYQGFCFQLTKN
FPTAQGVSKKLYKKLSSSDEETLKQYASKYTSNRRGDTSGNLKKQIAKVL
TEGYPTNKSDWLNGLTENEKIEVTQDATWYFTETTVPADRSYTNRNVNSQ
KMKEVYQKLIDTTDIDKYEDVQFDLFVPQDTNLQAVISVEPVIESLPWTS
LKPIAQKDITAKKIWVDAPKEKPTIYFKLYRQLPGEKEVAVDDAELKQTN
SEGQQEISVTWTNQLVTDEKGMAYIYSVKEVDKNGELLEPKDYIKKEDGL
TVTNTYVKPTSGHYDIEVTFGNGHIDITEDTTPDIVSGENQMKQIEGEDS
KPIDEVTENNLIEFGKNTMPGEEDGTNSNKYEEVEDSRPVDTLSGLSSEQ
GQSGDMTTEEDSATHIKFSKRDIDGKELAGATMELRDSSGKTISTWISDG
QVKDFYLMPGKYTFVETAAPDGYEVATAITFTVNEQGQVTVNGKATKGDA
HIVMVDAYKPTKGSGQVIDIEEKLPDEQGHSGSTTEIEDSKSSDVIIGGQ
GEVVDTTEDTQSGMTGHSGSTTKIEDSKSSDVIVGGQGQIVETTEDTQTG
MHGDSGRKTEVEDTKLVQSFHFDNKEPESNSEIPKKDKSKSNTSLPATGE
KQHNKFFWMVTSCSLISSVFVISLKSKKRLSSC

[1063] Examples of GAS AI-3 sequences from M5 isolate Manfredo are set forth below.

[1064] Orf 77 encodes a negative transcription regulator (Nra). An example of the nucleotide sequence encoding Nra (SEQ ID NO: 88) and an Nra amino acid sequence (SEQ ID NO: 89) are set forth below.

SEQ ID NO: 88

ATGCCTTATGTCAAAAAGAAAAAGGATAGTTTCTTAGTAGAAACATATCT
TGAACAGTCTATTAGAGATAAAAGTGAATTAGTCTTACTGTTATTTAAAT
CGCCTACTATCATTTTTTCTCATGTTGCTAAACAAACTGGTCTGACGGCT
GTACAATTAAAATATTACTGTAAAGAACTTGATGACTTTTTTGGAAATAA
TTTAGACATTACCATTAAAAAGGGCAAAATAATATGTTGTTTTGTCAAAC
CTGTTAAGGAATTCTACCTTCATCAACTCTATGACACATCAACAATATTA
AAATTATTAGTTTTCTTTATTAAAAATGGAACGTCATCACAACCTCTGAT
TAAATTTTCAAAAAAGTATTTTCTATCAAGCTCCTCAGCTTATCGACTAC
GGGAATCGCTGATCAAATTACTACGGGAATTTGGCTTGAGAGTCTCAAAA
AATACAATTGTCGGAGAGGAATATCGTATTCGCTATCTTATTGCCATGCT
ATATAGTAAATTTGGCATTGTCATCTATCCGTTAGATCATCTAGACAATC
AAATTATTTATCGCTTCTTATCACAAAGTGCAACCAATTTAAGAACATCG
CCCTGGCTAGAGGAACCTTTTTCTTTTTATAATATGTTACTTGCCTTGTC
ATGGAAACGTCACCAATTTGCAGTTAGCATTCCTCAAACACGTATTTTTC
GACAATTAAAAAAGCTTTTTATCTATGATTGTTTAACTCGAAGCAGTCGA
CAAGTAATCGAAAATGCTTTTTCGTTAATGTTCTCACAAGGAGATCTCGA
TTATCTTTTTTTAATTTATATTACCACCAATAATTCCTTTGCCAGCCTAC
AATGGACTCCACAGCATATTGAAACTTGCTGCCATATTTTTGAAAAAAAT
GACACATTTCGGTTATTGTTAGAGCCCATTCTTAAACGTTTACCGCAATT
AAACCATTCTAAACAAGACCTTATTAAAGCCCTTATGTATTTTTCAAAAT
CTTTTCTATTTAACCTCCAACATTTCGTCATCGAGATTCCTTCTTTTTCC
TTGCCGACCTATACAGGCAACTCTAATCTTTACAAAGCTTTAAAAAATAT
TGTAAATCAGTGGCTTGCTCAATTACCCGGAAAGCGTCATCTTAACGAAA
AGCATCTCCAACTTTTTTGCTCTCATATTGAACAAATCTTAAAAAATAAA
CAACCTGCTTTAACTGTCGTTTTAATATCTAGTAACTTTATAAATGCTAA
ACTCCTTACAGATACTATCCCACGATATTTTTCTGATAAAGGAATTCATT
TTTATTCTTTTTACTTATTAAGAGATGATATCTATCAAATTCCAAGCTTA
AAACCAGATTTAGTTATCACTCATAGCCGATTAATTCCTTTTGTTAAGAA
TGATCTGGTCAAAGGTGTTACTGTTGCTGAATTTTCTTTTGATAACCCTG
ACTACTCTATTGCTTCAATTCAAAACTTGATATATCAGCTCAAAGATAAA
AAATATCAAGATTTTCTAAACGAGCAATTACAA

SEQ ID NO: 89

MPYVKKKKDSFLVETYLEQSIRDKSELVLLLFKSPTIIFSHVAKQTGLTA
VQLKYYGKELDDFPGNNLDITIKKGKIICCFVKPVKEFYLHQLYDTSTIL
KLLVFFIKNGTSSQPLIKFSKKYFLSSSSAYRLRESLIKLLREFGLRVSK
NTIVGEEYRIRYLIAMLYSKFGIVIYPLDHLDNQIIYRFLSQSATNLRTS
PWLEEPFSFYNMLLALSWKRHQFAVSIPQTRIFRQLKKLFIYDCLTRSSR
QVIENAFSLMFSQGDLDYLFLIYITTNNSFASLQWTPQHIETCCHIFEKN
DTFRLLLEPILKRLPQLNHSKQDLIKALMYFSKSFLFNLQHFVIEIPSFS
LPTYTGNSNLYKALKNIVNQWLAQLPGKRHLNEKHLQLFCSHIEQILKNK
QPALTVVLISSNFINAKLLTDTIPRYFSDKGIHFYSEYLLRDDIYQIPSL
KPDLVITHSRLIPFVKNDLVKGVTVAEFSFDNPDYSIASIQNLIYQLKDK
KYQDFLNEQLQ

[1065] Orf 78 is thought to be a collagen binding protein (Cbp). An example of the nucleotide sequence encoding Cbp (SEQ ID NO: 90) and a Cbp amino acid sequence (SEQ ID NO: 91) are set forth below.

SEQ ID NO: 90

TTGCAAAAGAGGGATAAAACCAATTATGGAAGCGCTAACAACAAACGACG
ACAAACGACGATCGGATTACTGAAAGTATTTTTGACGTTTGTAGCTCTGA
TAGGAATAGTAGGGTTTTCTATCAGAGCGTTCGGAGCTGAAGAAAAATCT
ACTGAAACTAAAAAAACGTCAGTCATTATTAGAAAATATGCTGAAGGTGA
CTACTCTAAACTTCTAGAGGGAGCAACTTTGCGTTTAACAGGGGAAGATA
TCCCAGATTTTCAAGAAAAAGTCTTCCAAAGTAATGAACAGGAGAAAAAG
ATTGAATTATCAAATGGGACTTATACCTTAACAGAAACATCATCTCCAGA
TGGATATAAAATTACGGAGCCGATTAAGTTTAGAGTAGTGAATAAAAAAG
TATTTATCGTCCAAAAAGATGGTTCTCAAGTGGAAAACCCAAACAAAGAA
CTAGGTTCTCCATATACTATAGAGGCATACAATGATTTTGATGAATTTGG
CTTACTGTCAACACAAAATTATGCGAAATTTTATTATGGAAAAAACTATG
ATGGCAGTTCACAAATTGTTTATTGCTTCAATGCCAACTTGAAATCTCCA
CCTGACTCGGAAGATCATGGTGCTACAATAAATCCTGACTTTACGACTGG
TGATATTAGGTACAGTCATATTGCTGGTTCAGATTTGATAAAATACGCTA
ATACAGCTAGGGATGAAGATCCTCAATTATTTTTAAAACACGTAAAAAAA
GTAATTGAAAATGGGTATCATAAAAAAGGTCAAGCTATTCCATATAACGG
TCTGACTGAGGCACAGTTTCGTGCGGCTACTCAACTGGCAATTTATTATT
TTACAGATAGTGTTGACTTAACTAAGGATAGATTGAAAGACTTCCATGGA
TTTGGAGATATGAATGATCAAACTTTGGGTGTAGCTAAAAAAATTGTAGA
ATACGCTTTGAGTGATGAAGATTCAAAACTAACAAATCTTGATTTCTTCG
TACCTAATAATAGCAAATACCAATCTCTTATTGGGACAGAATACCATCCA
GATGATTTGGTTGACGTGATTCGTATGGAAGATAAAAAGCAAGAAGTTAT
TCCAGTAACTCATAGTTTGACGGTGCAAAAAACAGTAGTCGGTGAGTTGG
GAGATAAGACTAAAGGCTTTCAATTTGAACTTGAGTTGAAAGATAAAACT
GGACAGCCTATTGTTAACACTCTAAAAACTAATAATCAAGATTTAGTAGC
TAAAGATGGGAAATATTCATTTAATCTAAAGCATGGTGACACCATAAGAA
TAGAAGGATTACCGACGGGATATTCTTATACCCTGAAAGAGACTGAAGCT
AAGGATTATATAGTAACTGTTGATAACAAAGTTAGTCAAGAAGCTCAATC
AGCAAGTGAGAATGTCACAGCAGACAAAGAAGTCACTTTTGAAAACCGAA
AAGATCTTGTCCCACCAACTGGTTTGACAACAGATGGGGCTATCTATCTT
TGGTTATTACTACTTGTTCCATTTGGGTTATTGGTTTGGCTATTTGGTCG
TAAAGGGTTAAAAAATGAC

SEQ ID NO: 91

MQKRDKTNYGSANNKRRQTTIGLLKVFLTFVALIGIVGFSIRAFGAEEKS
TETKKTSVIIRKYAEGDYSKLLEGATLRLTGEDIPDFQEKVFQSNGTGEK
IELSNGTYTLTETSSPDGYKITEPEKFRVVNKKVFIVQKDGSQVENPNKE
LGSPYTIEAYNDFDEFGLLSTQNYAKFYYGKNYDGSSQIVYCFNANLKSP
PDSEDHGATINPDFTTGDIRYSHIAGSDLIKYANTARDEDPQLFLKHVKK
VIENGYHKKGQATPYNGLTEAQFRAATQLAIYYETDSVDLTKDRLKDPHG
FGDMNDQTLGVAKKIVEYALSDEDSKLTNLDFFVPNNSKYQSLIGTEYHP
DDLVDVIRMEDKKQEVTPVTHSLTVQKTVVGELGDKTKGFQFELELKDKT
GQPIVNTLKTNNQDLVAKDGKYSFNLKHGDTIRIEGLPTGYSYTLKETEA
KDYIVTVDNKVSQEAQSASENVTADKEVTFENRKDLVPPTGLTTDGAIYL
WLLLLVPFGLLVWLFGRKGLKND

[1066] Orf 78 contains an amino acid motif indicative of a cell wall anchor: SEQ ID NO: 184 VPPTG (shown in italics in SEQ ID NO: 91, above). In some recombinant host cell systems, it may be preferable to remove this motif to facilitate secretion of a recombinant Orf 78 protein from the host cell. Alternatively, in other recombinant host cell systems, it may be preferable to use the cell wall anchor motif to anchor the recombinantly expressed protein to the cell wall. The extracellular domain of the expressed protein may be cleaved during purification or the recombinant protein may be left attached to either inactivated host cells or cell membranes in the final composition.

[1067] Three E boxes containing conserved glutamic residues have been identified in Orf 78. The E-box motifs are underlined in SEQ ID NO: 91, below. The conserved glutamic acid (E) residues, at amino acid residues 112, 395, and 447, are marked in bold. The E box motifs, in particular the conserved glutamic acid residues, are thought to be important for the formation of oligomeric pilus-like structures of Orf 78. Preferred fragments of Orf 78 include at least one conserved glutamic acid residue. Preferably, fragments include at least one E box motif.

SEQ ID NO: 91

MQKRDKTNYGSANNKRRQTTIGLLKVFLTFVALIGIVGFSIRAFGAEEKS
TETKKTSVIIRKYAEGDYSKLLEGATLRLTGEDIPDFQEKVFQSNGTGEK
IELSNGTYTLTETSSPDGYKITEPEKFRVVNKKVFIVQKDGSQVENPNKE
LGSPYTIEAYNDFDEFGLLSTQNYAKFYYGKNYDGSSQIVYCFNANLKSP
PDSEDHGATINPDFTTGDIRYSHIAGSDLIKYANTARDEDPQLFLKHVKK
VIENGYHKKGQATPYNGLTEAQFRAATQLAIYYETDSVDLTKDRLKDPHG
FGDMNDQTLGVAKKIVEYALSDEDSKLTNLDFFVPNNSKYQSLIGTEYHP
DDLVDVIRMEDKKQEVTPVTHSLTVQKTVVGELGDKTKGFQFELELKDKT
GQPIVNTLKTNNQDLVAKDGKYSFNLKHGDTIRIEGLPTGYSYTLKETEA
KDYIVTVDNKVSQEAQSASENVTADKEVTFENRKDLVPPTGLTTDGAIYL
WLLLLVPFGLLVWLFGRKGLKND

[1068] Orf 79 is thought to be a LepA signal peptidase I. An example of the nucleotide sequence encoding a LepA signal peptidase I (SEQ ID NO: 92) and a LepA signal peptidase I amino acid sequence (SEQ ID NO: 93) are set forth below.

SEQ ID NO: 92

ATGACTAATTACCTAAATCGTTTAAATGAGAATTCACTATTTAAAGCTTT
CATACGGTTAGTACTTAAGATTTCTATTATTGGGTTTCTAGGTTACATTC
TATTTCAGTATGTTTTTGGTGTTATGATTATTAACACTAATGATATGAGT
CCTGCTTTAAGTGCAGGTGACGGTGTTTTATATTATCGTTTGACTGATCG
CTATCATATTAATGATGTGGTGGTCTATGAGGTTGATAACACTTTGAAAG
TTGGTCGAATTGTCGCTCAAGCTGGCGATGAGGTTAGTTTTACGCAAGAA
GGAGGACTGTTGATTAATGGGCATCCACCAGAAAAAGAGGTCCCTTACCT
GACGTATCCTCACTCAAGTGGCCCAAACTTTCCCTATAAAGTTCCTACGG
GTAAGTATTTCATATTGAATGATTATCGTGAAGAACGTTTGGACAGTCGT
TATTATGGGGCGTTACCCGTCAATCAAATAAAAGGGAAAATCTCAACTCT
ATTAAGAGTGAGAGGAATT

SEQ ID NO: 93

MTNYLNRLNENSLFKAFIRLVLKISIIGFLGYTLFQYVFGVMIINTNDMS
PALSAGDGVLYYRLTDRYHINDVVVYEVDNTLKVGRTVAQAGDEVSFTQE
GGLLINGHPPEKEVPYLTYPHSSGPNFPYKTPTGKYFILNDYREERLDSR
YYGALPVNQIKGKISTLLRVRGI

[1069] Orf 80 is thought to to be a fimbrial protein. An example of the nucleotide sequence encoding the fimbrial protein (SEQ ID NO: 94) and a fimbrial protein amino acid sequence (SEQ ID NO: 95) are set forth below.

SEQ ID NO: 94

TTGGAGAGAGAAAAAATGAAAAAAAACAAATTATTACTTGCTACTGCAAT
CTTAGCAACTGCTTTAGGAACAGCTTCTTTAAATCAAAACGTAAAAGCTG
AGACGGCAGGGGTTGTAACAGGAAAATCACTACAAGTTACAAAGACAATG
ACTTATGATGATGAAGAGGTGTTAATGCCCGAAACCGCCTTTACTTTTAC
TATAGAGCCTGATATGACTGCAAGTGGAAAAGAAGGCAGCCTAGATATTA
AAAATGGAATTGTAGAAGGCTTAGACAAACAAGTAACAGTAAAATATAAG
AATACAGATAAAACATCTCAAAAAACTAAAATAGCACAATTTGATTTTTC
TAAGGTTAAATTTCCAGCTATAGGTGTTTACCGCTATATGGTTTCAGAGA
AAAACGATAAAAAAGACGGAATTACGTACGATGATAAAAAGTGGACTGTA
GATGTTTATGTTGGGAATAAGGCCAATAACGAAGAAGGTTTCGAAGTTCT
ATATATTGTATCAAAAGAAGGTACTTCTAGTACTAAAAAACCAATTGAAT
TTACAAACTCTATTAAAACTACTTCCTTAAAAATTGAAAAACAAATAACT
GGCAATGCAGGAGATCGTAAAAAATCATTCAACTTCACATTAACATTACA
ACCAAGTGAATATTATAAAACTGGATCAGTTGTGAAAATCGAACAGGATG
GAAGTAAAAAAGATGTGACGATAGGAACGCCTTACAAATTTACTTTGGGA
CACGGTAAGAGTGTCATGTTATCGAAATTACCAATTGGTATCAATTACTA
TCTTAGTGAAGACGAAGCGAATAAAGACGGCTACACTACAACGGCAACAT
TAAAAGAACAAGGCAAAGAAAAGAGTTCCGATTTCACTTTGAGTACTCAA
AACCAGAAAACAGACGAATCTGCTGACGAAATCGTTGTCACAAATAAGCG
TGACACTCAAGTTCCAACTGGTGTTGTAGGGACCCTTGCTCCATTTGCAG
TTCTTAGCATTGTGGCTATTGGTGGAGTTATCTATATTACAAAACGTAAA
AAAGCT

SEQ ID NO: 95

MEREKMKKNKLLLATAILATALGTASLNQNVKAETAGVVTGKSLQVTKTM
TYDDEEVLMPETAFTPTIEPDMTASGKEGSLDIKNGIVEGLDKQVTVKYK
NTDKTSQKTKIAQFDFSKVKFPAIGVYRYMVSEKNDKKDGITYDDKKWTV
DVYVGNKANNEEGPEVLYIVSKEGTSSTKKPIEFTNSIKTTSLKIEKQIT
GNAGDRKKSFNFTLTLQPSEYYKTGSVVKIEQDGSKKDVTIGTPYKFTLG
HGKSVMLSKLPIGINYYLSEDEANKDGYTTTATLKEQGKEKSSDFTLSTQ
NQKTDESADEIVVTNKRDTQVPTGVVGTLAPFAVLSIVAIGGVIYITKRK
KA

[1070] Orf 82 contains an amino acid motif indicative of a cell wall anchor: SEQ ID NO: 140 QVPTG (shown in italics in SEQ ID NO: 95, above). In some recombinant host cell systems, it may be preferable to remove this motif to facilitate secretion of a recombinant Orf 82 protein from the host cell. Alternatively, in other recombinant host cell systems, it may be preferable to use the cell wall anchor motif to anchor the recombinantly expressed protein to the cell wall. The extracellular domain of the expressed protein may be cleaved during purification or the recombinant protein may be left attached to either inactivated host cells or cell membranes in the final composition.

[1071] An E box containing a conserved glutamic residue has been identified in Orf 80. The E-box motif is underlined in SEQ ID NO: 95, below. The conserved glutamic acid (E), at amino acid residue 270, is marked in bold. The E box motif, in particular the conserved glutamic acid residue, is thought to be important for the formation of oligomeric pilus-like structures of Orf 80. Preferred fragments of Orf 80 include at least one conserved glutamic acid residue. Preferably, fragments include at least one E box motif.

SEQ ID NO: 95

MEREKMKKNKLLLATAILATALGTASLNQNVKAETAGVVTGKSLQVTKTM
TYDDEEVLMPETAFTPTIEPDMTASGKEGSLDIKNGIVEGLDKQVTVKYK
NTDKTSQKTKIAQFDFSKVKFPAIGVYRYMVSEKNDKKDGITYDDKKWTV
DVYVGNKANNEEGPEVLYIVSKEGTSSTKKPIEFTNSIKTTSLKIEKQIT
GNAGDRKKSFNFTLTLQPSEYYKTGSVVKIEQDGSKKDVTIGTPYKFTLG
HGKSVMLSKLPIGINYYLSEDEANKDGYTTTATLKEQGKEKSSDFTLSTQ
NQKTDESADEIVVTNKRDTQVPTGVVGTLAPFAVLSIVAIGGVIYITKRK
KA

[1072] Orf 81 is thought to to be a SrtC2 type sortase. An example of the nucleotide sequence encoding the SrtC2 sortase (SEQ ID NO: 96) and a SrtC2 sortase amino acid sequence (SEQ ID NO: 97) are set forth below.

SEQ ID NO: 96

GTGATTAGTCAAAGAATGATGATGACAATTGTACAGGTTATCAATAAAGC
CATTGATACTCTCATTCTTATCTTTTGTTTAGTCGTACTATTTTTAGCTG
GTTTTGGTTTGTGGGATTCTTATCATCTCTATCAACAAGCAGACGCTTCT
AATTTCAAAAAATTTAAAACAGCTCAACAACAGCCTAAATTTGAAGACTT
GTTAGCTTTGAATGAGGATGTCATTGGTTGGTTAAATATCCCAGGGACTC
ATATTGATTATCCTCTAGTTCAGGGAAAAACGAATTTAGAGTATATTAAT
AAAGCAGTTGATGGCAGTGTTGCCATGTCTGGTAGTTTATTTTTAGATAC
ACGGAATCATAATGATTTTACGGACGATTACTCTCTGATTTATGGCCATC
ATATGGCAGGTAATGCCATGTTTGGCGAAATTCCAAAATTTTTAAAAAAG
GATTTTTTCAACAAACATAATAAAGCTATCATTGAAACAAAAGAGAGAAA
AAAACTAACCGTCACTATTTTTGCTTGTCTCAAGACAGATGCCTTTGACC
AGTTAGTTTTTAATCCTAATGCTATTACCAATCAAGACCAACAAAAGCAG
CTCGTTGATTATATCAGTAAAAGATCAAAACAATTTAAACCTGTTAAATT
GAAGCATCATACAAAGTTCGTTGCTTTTTCAACGTGTGAAAATTTTTCTA
CTGACAATCGTGTTATCGTTGTCGGTACTATTCAAGAA

SEQ ID NO: 97

MISQRMMMTIVQVINKAIDTLILIFCLVVLFLAGFGLWDSYHLYQQADAS
NFKKFKTAQQQPKFEDLLALNEDVIGWLNIPGTHIDYPLVQGKTNLEYIN
KAVDGSVAMSGSLFLDTRNHNDFTDDYSLIYGHHMAGNAMFGEIPKFLKK
DFFNKHNKAIIETKERKKLTVTIFACLKTDAFDQLVFNPNAITNQDQQKQ
LVDYISKRSKQFKPVKLKHHTKFVAFSTCENFSTDNRVIVVGTIQE

[1073] Orf 82 is referred to as a hypothetical protein. It contains a sortase substrate motif LPXAG shown in italics in SEQ ID NO: 99. An example of the nucleotide sequence encoding the hypothetical protein (SEQ ID NO: 98) and a hypothetical protein amino acid sequence (SEQ ID NO: 99) are set forth below.

SEQ ID NO: 98

TTGCTTTTTCAACGTGTGAAAATTTTTCTACTGACAATCGTGTTATCGTT
GTCGGTACTATTCAAGAATAACGAAAGGAGGAGACTTTTGAGAAAATATT
GGAAAATGTTATTTTCTGTCGTAATGATATTAACCATGCTGGCCTTTAAT
CAGACTGTTTTAGCAAAAGACAGCACTGTTCAAACTAGCATTAGTGTCGA
AAATGTCTTAGAGAGAGCAGGCGATAGTACCCCATTTTCGGTTGCATTAG
AATCAATTGATGCGATGAAAACAATAGACGAAATAACAATTGCTGGTTCT
GGAAAAGCAAGCTTTTCCCCTCTGACCTTCACAACAGTTGGGCAATATAC
TTATCGTGTTTATCAGAAGCCTTCACAAAATAAAGATTATCAAGCAGATA
CTACTGTATTTGACGTTCTTGTCTATGTGACCTATGATGAAGATGGGACT
CTAGTCGCAAAAGTTATTTCTCGAAGGGCTGGAGACGAAGAAAAATCAGC
GATTACTTTTAAGCCCAAACGGTTAGTAAAACCAATACCGCCTAGACAAC
CTAACATCCCTAAAACCCCATTACCATTAGCTGGTGAAGTAAAAAGTTTA
TTGGGTATCTTAAGTATCGTATTACTGGGGTTACTAGTTCTTCTTTATGT
TAAAAAACTGAAGAGTAGGCTA

SEQ ID NO: 99

MLFQRVKIFLLTIVLSLSVLFKNNERRRLLRKYWKMLFSVVMILTMLAFN
QTVLAKDSTVQTSISVENVLEPAGDSTPFSVALESIDAMKTIDEITIAGS
GKASFSPLTFTTVGQYTYRVYQKPSQNKDYQADTTVFDVLVYVTYDEDGT
LVAKVISRRAGDEEKSAITFKPKRLVKPIPPRQPNIPKTPLPLAGEVKSL
LGILSTVLLGLLVLLYVKKLKSRL

[1074] Orf 82 contains an amino acid motif indicative of a cell wall anchor: SEQ ID NO: 185 LPLAG (shown in italics in SEQ ID NO: 99, above). In some recombinant host cell systems, it may be preferable to remove this motif to facilitate secretion of a recombinant Orf 82 protein from the host cell. Alternatively, in other recombinant host cell systems, it may be preferable to use the cell wall anchor motif to anchor the recombinantly expressed protein to the cell wall. The extracellular domain of the expressed protein may be cleaved during purification or the recombinant protein may be left attached to either inactivated host cells or cell membranes in the final composition.

[1075] A pilin motif, discussed above, containing a conserved lysine (K) residue has also been identified in Orf 82. The pilin motif sequence is underlined in SEQ ID NO: 99, below. Conserved lysine (K) residues are also marked in bold, at amino acid residues 173 and 188. The pilin sequence, in particular the conserved lysine residues, are thought to be important for the formation of oligomeric, pilus-like structures. Preferred fragments of Orf 82 include at least one conserved lysine residue. Preferably, fragments include the pilin sequence.

SEQ ID NO: 99

MLFQRVKIFLLTIVLSLSVLFKNNERRRLLRKYWKMLFSVVMILTMLAFN
QTVLAKDSTVQTSISVENVLERAGDSTPFSVALESIDAMKTIDEITTAGS
GKASFSPLTFTTVGQYTYRVYQKPSQNKDYQADTTVFDVLVYVTYDEDGT
LVAKVISRRAGDEEKSAITFKPKRLVKPIPPRQPNIPKTPLPLAGEVKSL
LGILSIVLLGLLVLLYVKKLKSRL

[1076] An E box containing a conserved glutamic residue has been identified in Orf 82. The E-box motif is underlined in SEQ ID NO: 99, below. The conserved glutamic acid (E), at amino acid residue 163, is marked in bold. The E box motif, in particular the conserved glutamic acid residue, is thought to be important for the formation of oligomeric pilus-like structures of Orf 82. Preferred fragments of Orf 82 include the conserved glutamic acid residue. Preferably, fragments include the E box motif.

SEQ ID NO: 99

MLFQRVKIFLLTIVLSLSVLFKNNERRRLLRKYWKMLFSVVMILTMLAFN
QTVLAKDSTVQTSISVENVLEPAGDSTPFSVALESIDAMKTIDEITIAGS
GKASFSPLTFTTVGQYTYRVYQKPSQNKDYQADTTVFDVLVYVTYDEDGT
LVAKVISRRAGDEEKSAITFKPKRLVKPIPPRQPNIPKTPLPLAGEVKSL
LGILSTVLLGLLVLLYVKKLKSRL

[1077] Orf 83 is thought to to be a multiple sugar metabolism regulator protein. An example of a nucleotide sequence encoding the sugar metabolism regulator protein (SEQ ID NO: 100) and a sugar metabolism regulator protein amino acid sequence (SEQ ID NO: 101) are set forth below.

SEQ ID NO: 100

ATGATACAACTAAGGATGGGGGCAATCTATCAAATGGTTATATTCGATTT
AAAACATGTGCAAACATTACACAGCTTGTCTCAATTACCTATTTCAGTGA
TGTCACAAGATAAGGCACTTATTCAAGTATATGGTAATGACGACTATTTA
TTATGTTACTATCAATTTTTAAAGCATCTAGCTATTCCTCAAGCTGCACA
AGATGTTATTTTTTATGAGGGTTTATTTGAAGAGTCCTTTATGATTTTTC
CTCTTTGTCACTACATTATTGCCATTGGACCTTTCTATCCTTATTCACTT
AATAAAGACTATCAGGAACAATTAGCTAATAATTTTTTAAAACATTCTTC
TCATCGTAGCAAAGAAGAGCTCTTGTCCTATATGGCACTTGTCCCACATT
TTCCAATTAATAATGTGCGGAACCTTTTGATAGCTATTGACGCTTTTTTT
GACACACAATTTGAGACGACTTGCCAACAAACGATTCATCAATTGTTGCA
GCATTCAAAACAGATGACTGCTGATCCTGATATCATTCATCGCCTTAAGC
ATATTAGCAAAGCATCTAGCCAATTACCGCCTGTTTTAGAGCACCTAAAT
CATATTATGGATCTGGTAAAGCTAGGCAATCCACAATTGCTCAAGCAAGA
AATCAATCGCATCCCCTTATCAAGTATCACCTCATCTTCTATTTCTGCTC
TAAGGGCGGAAAGAACCTCACTGTTATCTATTTCAACTAGGTTACTGGAA
TTCAGTTTTGTAGAAAATACTGACGTAGCAAAGCATTATAGCCTTGTCAA
ATACTACATGGCCTTAAATGAAGAAGCGAGTGACTTGCTCAAAGTTTTGA
GAATTCGCTGTGCAGCTATCATCCATTTTTCCGAATCATTAACCAATAAA
AGTATTTCTGATAAACGTCAAATGTACAATAGTGTGCTTCATTATGTCGA
TAGTCACCTGTATTCCAAATTAAAGGTATCTGATATCGCTAAGCGCCTAT
ATGTTTCCGAATCTCACTTACGTTCAGTCTTTAAAAAATACTCAAATGTT
TCCTTACAACATTATATTCTAAGTACAAAAATCAAAGAAGCTCAACTACT
CTTAAAACGAGGAATTCCTGTTGGAGAAGTGGCTAAAAGCTTATATTTTT
ATGACACTACCCATTTTCATAAAATCTTTAAAAAATACACGGGTATTTCT
TCAAAAGACTATCTTGCTAAATACCGAGATAATATT

SEQ ID NO: 101

MIQLRMGAIYQMVIFDLKHVQTLHSLSQLPISVMSQDKALIQVYGNDDYL
LCYYQFLKHLAIPQAAQDVIFYEGLFEESFMIFPLCHYIIAIGPFYPYSL
NKDYQEQLANNFLKHSSHRSKEELLSYMALVPHFPINNVRNLLIAIDAFF
DTQFETTCQQTIHQLLQHSKQMTADPDIIHRLKHISKASSQLPPVLEHLN
HIMDLVKLGNPQLLKQEINRIPLSSITSSSISALRAEKNLTVIYLTRLLE
FSFVENTDVAKHYSLVKYYMALNEEASDLLKVLRIRCAAIIHFSESLTNK
SISDKRQMYNSVLHYVDSHLYSKLKVSDIAKRLYVSESHLRSVFKKYSNV
SLQHYILSTKIKEAQLLLKRGIPVGEVAKSLYFYDTTHFHKIFKKYTGTS
SKDYLAKYRDNI

[1078] Orf 84 is thought to to be a F2-like fibronectin-binding protein. An example of a nucleotide sequence encoding the F2-like fibronectin-binding protein (SEQ ID NO: 102) and a F2-like fibronectin-binding protein amino acid sequence (SEQ ID NO: 103) are set forth below.

SEQ ID NO: 102

ATGACACAAAAAAATAGCTATAAGTTAAGCTTCCTGTTATCCCTAACAGG
ATTTATTTTAGGTTTATTATTGGTTTTTATAGGATTGTCCGGAGTATCAG
TAGGACATGCGGAAACAAGAAATGGAGCAAACAAACAAGGAGCTTTTGAA
ATCAAGAAAAATAAAAGTCAAGAAGAATATAATTATGAAGTTTATGATAA
CAGAAACATACTTCAGGATGGGGAACATAAACTTGAAATAAAAAGAGTTG
ATGGGACAGGTAAAACTTATCAAGGTTTTTGCTTTCAGTTAACGAAAAAT
TTTCCCACTGCTCAAGGTGTAAGTAAAAAGCTGTATAAAAAATTGAGTAG
TAGTGATGAAGAAACACTAAAGCAATATGCCTCTAAGTATACAAGTAATA
GGAGAGGAGATACTAGTGGTAATCTTAAAAAGCAAATTGCTAAGGTTCTG
ACAGAAGGTTACCCAACTAACAAAAGTGATTGGTTAAATGGATTGACTGA
AAACGAAAAAATAGAAGTAACCCAGGATGCAATTTGGTATTTTACAGAAA
CGACAGTTCCGGCTGATAGAAGTTATACGAATCGCAACGTAAATAGTCAA
AAAATGAAAGAAGTGTATCAAAAGCTAATTGATACAACAGATATAGATAA
ATATGAAGATGTACAATTTGATTTATTTGTGCCACAAGATACAAACTTAC
AGGCAGTAATTAGTGTAGAGCCTGTTATCGAAAGCCTTCCTTGGACATCG
TTGAAGCCAATAGCCCAGAAGGATATCACTGCCAAAAAAATCTGGGTAGA
TGCACCTAAAGAAAAACCAATTATTTATTTTAAGCTATATAGACAGCTGC
CTGGAGAAAAGGAAGTAGCAGTGGATGACGCTGAGCTAAAACAGATAAAT
AGTGAAGGTCAACAAGAAATATCAGTAACTTGGACAAATCAACTTGTTAC
AGATGAAAAAGGAATGGCTTACATTTATTCTGTAAAAGAAGTAGATAAAA
ATGGCGAGTTACTTGAGCCAAAAGATTATATCAAGAAGGAAGATGGACTT
ACAGTTACTAATACTTATGTAAAGCCAACTAGTGGGCACTATGATATAGA
AGTGACATTTGGAAATGGACATATTGATATTACAGAAGATACTACACCAG
ATATTGTTTCAGGTGAAAACCAAATGAAGCAAATAGAGGGAGAAGATAGT
AAGCCTATTGATGAAGTAACGGAAAATAATTTAATTGAATTTGGTAAAAA
CACGATGCCAGGTGAAGAAGATGGCACAAATTCTAATAAGTATGAAGAAG
TCGAAGACTCACGCCCAGTTGATACCTTGTCAGGTTTATCAAGTGAGCAA
GGTCAGTCCGGTGATATGACAATTGAAGAAGATAGTGCTACCCATATTAA
ATTCTCAAAACGTGATATTGACGGCAAAGAGTTAGCTGGTGCAACTATGG
AGTTGCGTGATTCATCTGGTAAAACTATTAGTACATGGATTTCAGATGGA
CAAGTGAAAGATTTCTACCTGATGCCAGGAAAATATACATTTGTCGAAAC
CGCAGCACCAGACGGTTATGAGATAGCAACTGCTATTACCTTTACAGTTA
ATGAGCAAGGTCAGGTTACTGTAAATGGCAAAGCAACTAAAGGTGACGCT
CATATTGTCATGGTTGATGCTTACAAGCCAACTAAGGGTTCAGGTCAGGT
TATTGATATTGAAGAAAAGCTTCCAGACGAGCAGGGCCATTCTGGCTCAA
CTACTGAAATAGAAGATAGCAAGTCTTCAGACGTTATCATTGGTGGTCAG
GGGCAGATTGTCGAGACAACAGAGGATACCCAAACTGGCATGCACGGGGA
TTCTGGTTGTAAAACGGAAGTCGAAGATACTAAACTAGTACAATCCTTCC
ACTTTGATAACAAGGAATCAGAAAGTAACTCTGAGATTCCTAAAAAAGAT
AAGCCAAAGAGTAATACTAGTTTACCAGCAACTGGTGAGAAGCAACATAA
TATGTTCTTTTGGATGGTTACTTCTTGCTCACTTATTAGTAGTGTTTTTG
TAATATCACTAAAAACTAAAAAACGCCTATCATCATGT

SEQ ID NO: 103

MTQKNSYKLSFLLSLTGFILGLLLVFIGLSGVSVGHAETRNGANKQGAFE
IKKNKSQEEYNYEVYDNRNILQDGEHKLEIKRVDGTGKTYQGFCFQLTKN
FPTAQGVSKKLYKKLSSSDEETLKQYASKYTSNRRGDTSGNLKKQIAKVL
TEGYPTNKSDWLNGLTENEKIEVTQDAIWYFTETTVPADRSYTNRNVNSQ
KMKEVYQKLIDTTDIDKYEDVQFDLFVPQDTNLQAVISVEPVIESLPWTS
LKPIAQKDITAKKIWVDAPKEKPIIYFKLYRQLPGEKEVAVDDAELKQIN
SEGQQEISVTWTNQLVTDEKGMAYIYSVKEVDKNGELLEPKDYIKKEDGL
TVTNTYVKPTSGHYDIEVTFGNGHIDITEDTTPDIVSGENQMKQIEGEDS
KPIDEVTENNLIEFGKNTMPGEEDGTNSNKYEEVEDSRPVDTLSGLSSEQ
GQSGDMTIEEDSATHIKFSKRDIDGKELAGATMELRDSSGKTISTWISDG
QVKDFYLMPGKYTFVETAAPDGYEIATAITFTVNEQGQVTVNGKATKGDA
HIVMVDAYKPTKGSGQVIDIEEKLPDEQGHSGSTTEIEDSKSSDVIIGGQ
GQIVETTEDTQTGMHGDSGCKTEVEDTKLVQSFHFDNKESESNSEIPKKD
KPKSNTSLPATGEKQHNMFFWMVTSCSLISSVFVISLKTKKRLSSC

[1079] Orf 84 contains an amino acid motif indicative of a cell wall anchor: SEQ ID NO: 181 LPATG (shown in italics in SEQ ID NO: 103, above). In some recombinant host cell systems, it may be preferable to remove this motif to facilitate secretion of a recombinant Orf 84 protein from the host cell. Alternatively, in other recombinant host cell systems, it may be preferable to use the cell wall anchor motif to anchor the recombinantly expressed protein to the cell wall. The extracellular domain of the expressed protein may be cleaved during purification or the recombinant protein may be left attached to either inactivated host cells or cell membranes in the final composition.

[1080] A pilin motif, discussed above, containing a conserved lysine (K) residue has also been identified in Orf 84. The pilin motif sequence is underlined in SEQ ID NO: 103, below. A conserved lysine (K) residue is also marked in bold, at amino acid residue 270. The pilin sequence, in particular the conserved lysine residue, is thought to be important for the formation of oligomeric, pilus-like structures. Preferred fragments of Orf 84 include the conserved lysine residue. Preferably, fragments include the pilin sequence.

SEQ ID NO: 103

MTQKNSYKLSFLLSLTGFILGLLLVFIGLSGVSVGHAETRNGANKQGAFE
IKKNKSQEEYNYEVYDNRNILQDGEHKLEIKRVDGTGKTYQGFCFQLTKN
FPTAQGVSKKLYKKLSSSDEETLKQYASKYTSNRRGDTSGNLKKQIAKVL
TEGYPTNKSDWLNGLTENEKIEVTQDAIWYFTETTVPADRSYTNRNVNSQ
KMKEVYQKLIDTTDIDKYEDVQFDLFVPQDTNLQAVTSVEPVIESLPWTS
LKPIAQKDITAKKIWVDAPKEKPIIYFKLYRQLPGEKEVAVDDAELKQIN
SEGQQEISVTWTNQLVTDEKGMAYIYSVKEVDKNGELLEPKDYIKKEDGL
TVTNTYVKPTSGHYDIEVTFGNGHIDITEDTTPDIVSGENQMKQIEGEDS
KPIDEVTENNLIEPGKNTMPGEEDGTNSNKYEEVEDSRPVDTLSGLSSEQ
GQSGDMTIEEDSATHIKFSKRDIDGKELAGATMELRDSSGKTISTWISDG
QVKDFYLMPGKYTFVETAAPDGYEIATAITFTVNEQGQVTVNGKATKGDA
HIVMVDAYKPTKGSGQVIDIEEKLPDEQGHSGSTTEIEDSKSSDVIIGGQ
GQIVETTEDTQTGMHGDSGCKTEVEDTKLVQSFHFDNKESESNSEIPKKD
KPKSNTSLPATGEKQHNMFEWMVTSCSLISSVFVISLKTKKRLSSC

[1081] An E box containing a conserved glutamic residue has been identified in Orf 84. The E-box motif is underlined in SEQ ID NO: 103, below. The conserved glutamic acid (E), at amino acid residue 516, is marked in bold. The E box motif, in particular the conserved glutamic acid residue, is thought to be important for the formation of oligomeric pilus-like structures of Orf 84. Preferred fragments of Orf 84 include the conserved glutamic acid residue. Preferably, fragments include the E box motif.

SEQ ID NO: 103

MTQKNSYKLSFLLSLTGFILGLLLVFIGLSGVSVGHAETRNGANKQGAFE
IKKNKSQEEYNYEVYDNRNILQDGEHKLEIKRVDGTGKTYQGFCFQLTKN
FPTAQGVSKKLYKKLSSSDEETLKQYASKYTSNRRGDTSGNLKKQIAKVL
TEGYPTNKSDWLNGLTENEKIEVTQDAIWYFTETTVPADRSYTNRNVNSQ
KMKEVYQKLIDTTDIDKYEDVQFDLFVPQDTNLQAVTSVEPVIESLPWTS
LKPIAQKDITAKKIWVDAPKEKPIIYFKLYRQLPGEKEVAVDDAELKQIN
SEGQQEISVTWTNQLVTDEKGMAYIYSVKEVDKNGELLEPKDYIKKEDGL
TVTNTYVKPTSGHYDIEVTFGNGHIDITEDTTPDIVSGENQMKQIEGEDS
KPIDEVTENNLIEPGKNTMPGEEDGTNSNKYEEVEDSRPVDTLSGLSSEQ
GQSGDMTIEEDSATHIKFSKRDIDGKELAGATMELRDSSGKTISTWISDG
QVKDFYLMPGKYTFVETAAPDGYEIATAITFTVNEQGQVTVNGKATKGDA
HIVMVDAYKPTKGSGQVIDIEEKLPDEQGHSGSTTEIEDSKSSDVIIGGQ
GQIVETTEDTQTGMHGDSGCKTEVEDTKLVQSFHFDNKESESNSEIPKKD
KPKSNTSLPATGEKQHNMFEWMVTSCSLISSVFVISLKTKKRLSSC

[1082] Examples of GAS AI-3 sequences from M18 strain isolate MGAS 8232 are set forth below.

[1083] SpyM18_{—}0125 is a negative transcriptional regulator (Nra). An example of SpyM18_{—}0125 is set forth in SEQ ID NO: 72.

SEQ ID NO: 72

MPYVKKKKDSFLVETYLEQSIRDKSELVLLLFKSPTIIFSHVAKQTGLTA
VQLKYYCKELDDFFGNNLDITIKKGKIICCFVKPVKEFYLHQLYDTSTIL
KLLVFFIKNGTTSQPLIKFSKKYFLSSSSAYRLRESLIKLLREFGLRVSK
NTIVGEEYRIRYLIAMLYSKFGIVIYPLDHLDNQIIYRFLSQSATNLRTS
PWLEEPFSFYNMLLALS

[1084] SpyM18_{—}0126 is thought to be a collagen binding protein (CBP). An example of SpyM18_{—}0126 is set forth in SEQ ID NO: 73.

SEQ ID NO: 73

MQKRDKTNYGSANNKRRQTTIGLLKVFLTFVALIGIVGFSIRAFGAEEQS
TETKKTSVIIRKYAEGDYSKLLEGATLKLAQIEGSGFQEQSFESSTSGQK
LQLSDGTYILTETKSPQGYEIAEPITFKVTAGKVFIKGKDGQFVENQNKE
VAEPYSVTAYNDFDDSGFINPKTFTPYGKFYYAKNANGTSQVVYCFNVDL
HSPPDSLDKGETIDPDFNEGKEIKYTHILGADLFSYANNPRASTNDELLS
QVKKVLEKGYRDDSTTYANLTSVEFRAATQLAIYYFTDSVDLDNLADYHG
FGALTTEALNATKEIVAYAEDRANLPNISNLDFYVPNSNKYQSLIGTQYH
PESLVDIIRMEDKQAPIIPITHKLTISKTVTGTIADKKKEFNFEIHLKSS
DGQAISGTYPTNSGELTVTDGKATFTLKDGESLIVEGLPSGYSYEITETG
ASDYEVSVNGKNAPDGKATKASVKEDETITFENRKDLVPPTGLTTDGAIY
LWLLLLVLLGLWVWLIGRKGLKND

[1085] SpyM18_{—}0126 contains an amino acid motif indicative of a cell wall anchor: SEQ II ID NO: 184 VPPTG (shown in italics in SEQ ID NO: 73, above). In some recombinant host cell systems, it may be preferable to remove this motif to facilitate secretion of a recombinant SpyM18_{—}0126 protein from the host cell. Alternatively, in other recombinant host cell systems, it may be preferable to use the cell wall anchor motif to anchor the recombinantly expressed protein to the cell wall. The extracellular domain of the expressed protein may be cleaved during purification or the recombinant protein may be left attached to either inactivated host cells or cell membranes in the final composition.

[1086] A pilin motif, discussed above, containing a conserved lysine (K) residue has also been identified in SpyM18_{—}0126. The pilin motif sequence is underlined in SEQ ID NO: 73, below. Conserved lysine (K) residues are also marked in bold, at amino acid residues 172 and 179. The pilin sequence, in particular the conserved lysine residues, are thought to be important for the formation of oligomeric, pilus-like structures. Preferred fragments of SpyM18_{—}0126 include at least one conserved lysine residue. Preferably, fragments include the pilin sequence.

SEQ ID NO: 73

MQKRDKTNYGSANNKRRQTTIGLLKVFLTFVALIGIVGFSIRAFGAEEQS
TETKKTSVIIRKYAEGDYSKLLEGATLKLAQIEGSGFQEQSFESSTSGQK
LQLSDGTYILTETKSPQGYEIAEPITFKVTAGKVFIKGKDGQFVENQNKE
VAEPYSVTAYNDFDDSGFINPKTFTPYGKFYYAKNANGTSQVVYCFNVDL
HSPPDSLDKGETIDPDFNEGKEIKYTHILGADLFSYANNPRASTNDELLS
QVKKVLEKGYRDDSTTYANLTSVEFRAATQLAIYYFTDSVDLDNLADYHG
FGALTTEALNATKEIVAYAEDRANLPNISNLDFYVPNSNKYQSLIGTQYH
PESLVDIIRMEDKQAPIIPITHKLTISKTVTGTIADKKKEFNFEIHLKSS
DGQAISGTYPTNSGELTVTDGKATFTLKDGESLIVEGLPSGYSYEITETG
ASDYEVSVNGKNAPDGKATKASVKEDETITFENRKDLVPPTGLTTDGAIY
LWLLLLVLLGLWVWLIGRKGLKND

[1087] Three E boxes containing conserved glutamic residues have been identified in SpyM18_{—}0126. The E-box motifs are underlined in SEQ ID NO: 73, below. The conserved glutamic acid (E) residues, at amino acid residues 112, 257, and 415, are marked in bold. The E box motifs, in particular the conserved glutamic acid residues, are thought to be important for the formation of oligomeric pilus-like structures of SpyM18_{—}0126. Preferred fragments of SpyM18_{—}0126 include at least one conserved glutamic acid residue. Preferably, fragments include at least one E box motif.

SEQ ID NO: 73

MQKRDKTNYGSANNKRRQTTIGLLKVFLTFVALIGIVGFSIRAFGAEEQS
TETKKTSVIIRKYAEGDYSKLLEGATLKLAQIEGSGFQEQSFESSTSGQK
LQLSDGTYILTETKSPQGYEIAEPITFKVTAGKVFIKGKDGQFVENQNKE
VAEPYSVTAYNDFDDSGFINPKTFTPYGKFYYAKNANGTSQVVYCFNVDL
HSPPDSLDKGETIDPDFNEGKEIKYTHILGADLFSYANNPRASTNDELLS
QVKKVLEKGYRDDSTTYANLTSVEFRAATQLAIYYFTDSVDLDNLADYHG
FGALTTEALNATKEIVAYAEDRANLPNISNLDFYVPNSNKYQSLIGTQYH
PESLVDIIRMEDKQAPIIPITHKLTISKTVTGTIADKKKEFNFEIHLKSS
DGQAISGTYPTNSGELTVTDGKATFTLKDGESLIVEGLPSGYSYEITETG
ASDYEVSVNGKNAPDGKATKASVKEDETITFENRKDLVPPTGLTTDGAIY
LWLLLLVLLGLWVWLIGRKGLKND

[1088] SpyM18_{—}0127 is a LepA protein. An example of SpyM18_{—}0127 is shown in SEQ ID NO: 74.

SEQ ID NO: 74

MTNYLNRLNENPLEKAFIRLVLKISIIGFLGYILFQYIFGVMIINTNVMS
PALSAGDGILYYRLTDRYHINDVVVYEVDNTLKVGRIVAQAGDEVSFTQE
GGLLINGHPPEKEVPYLTYPHSSGPNFPYKVPTGTYFILNDYREERLDSR
YYGALPINQIKGKISTLLRVRGI

[1089] SpyM18_{—}0128 is thought to be a fimbrial protein. An example of SypM18_{—}0128 is shown in SEQ ID NO: 75.

SEQ ID NO: 75

MKKNKLLLATAILATALGTASLNQNVKAETAGVIDGSTLVVKKTFPSYTD
DKVLMPKADYTFKVEADDNAKGKTKDGLDIKPGVTDGLENTKTIHYGNSD
KTTAKEKSVNFDFANVKFPGVGVYRYTVSEVNGNKAGIAYDSQQWTVDVY
VVNREDGGFEAKYIVSTEGGQSDKKPVLFKNFFDTTSLKVTKKVTGNTGE
HQRSFSFTLLLTPNECFEKGQVVNILQGGETKKVVIGEEYSFTLKDKESV
TLSQLPVGIEYKVTEEDVTKDGYKTSATLKDGDVTDGYNLGDSKTTDKST
DEIVVTNKRDTQVPTGVVGTLAPFAVLSIVATGGVIYITKRKKA

[1090] SpyM18_{—}0128 contains an amino acid motif indicative of a cell wall anchor: SEQ ID NO: 140 QVPTG (shown in italics in SEQ ID NO: 75, above). In some recombinant host cell systems, it may be preferable to remove this motif to facilitate secretion of a recombinant SpyM18_{—}0128 protein from the host cell. Alternatively, in other recombinant host cell systems, it may be preferable to use the cell wall anchor motif to anchor the recombinantly expressed protein to the cell wall. The extracellular domain of the expressed protein may be cleaved during purification or the recombinant protein may be left attached to either inactivated host cells or cell membranes in the final composition.

[1091] A pilin motif, discussed above, containing a conserved lysine (K) residue has also been identified in SpyM18_{—}0128. The pilin motif sequence is underlined in SEQ ID NO: 75, below. A conserved lysine (K) residue is also marked in bold, at amino acid residue 57. The pilin sequence, in particular the conserved lysine residue, is thought to be important for the formation of oligomeric, pilus-like structures. Preferred fragments of SpyM18_{—}0128 include the conserved lysine residue. Preferably, fragments include at least one pilin sequence.

SEQ ID NO: 75

MKKNKLLLATAILATALGTASLNQNVKAETAGVIDGSTLVVKKTFPSYTD
DKVLMPKADYTFKVEADDNAKGKTKDGLDIKPGVIDGLENTKTIHYGNSD
KTTAKEKSVNFDFANVKFPGVGVYRYTVSEVNGNKAGIAYDSQQWTVDVY
VVNREDGGFEAKYIVSTEGGQSDKKPVLFKNFFDTTSLKVTKKVTGNTGE
HQRSFSFTLLLTPNECFEKGQVVNILQGGETKKVVIGEEYSFTLKDKESV
TLSQLPVGIEYKVTEEDVTKDGYKTSATLKDGDVTDGYNLGDSKTTDKST
DEIVVTNKRDTQVPTGVVGTLAPFAVLSIVAIGGVIYITKRKKA

[1092] An E box containing a conserved glutamic residue has been identified in SpyM18_{—}0128. The E-box motif is underlined in SEQ ID NO: 75, below. The conserved glutamic acid (E), at amino acid residue 266, is marked in bold. The E box motif, in particular the conserved glutamic acid residue, is thought to be important for the formation of oligomeric pilus-like structures of SpyM18_{—}0128. Preferred fragments of SpyM18_{—}0128 include the conserved glutamic acid residue. Preferably, fragments include the E box motif.

SEQ ID NO: 75

MKKNKLLLATAILATALGTASLNQNVKAETAGVIDGSTLVVKKTFPSYTD
DKVLMPKADYTFKVEADDNAKGKTKDGLDIKPGVIDGLENTKTIHYGNSD
KTTAKEKSVNFDFANVKFPGVGVYRYTVSEVNGNKAGIAYDSQQWTVDVY
VVNREDGGFEAKYIVSTEGGQSDKKPVLFKNFFDTTSLKVTKKVTGNTGE
HQRSFSFTLLLTPNECFEKGQVVNILQGGETKKVVIGEEYSFTLKDKESV
TLSQLPVGIEYKVTEEDVTKDGYKTSATLKDGDVTDGYNLGDSKTTDKST
DEIVVTNKRDTQVPTGVVGTLAPFAVLSIVAIGGVIYITKRKKA

[1093] SpyM18_{—}0129 is a SrtC2 type sortase. An example of SpyM18_{—}0129 is shown in SEQ ID NO: 76

SEQ ID NO: 76

MISQRMMMTIVQVINKAIDTLILIFCLVVLFLAGFGLWDSYHLYQQADAS
NFKKFKTAQQQPKFEDLLALNEDVIGWLNIPGTHMDYPLVQGKTNLEYIN
KAVDGSVAMSGSLFLDTRNHNDFTDDYSLIYGHHMAGNAMFGEIPKFLKK
DFFNKHNKAIIETKERKKLTVTIFACLKTDAFDQLVFNPNAITNQDQQRQ
LVDYISKRSKQFKPVKLKHHTKFVAFSTCENFSTDNRVIVVGTIQE

[1094] SpyM18_{—}0130 is referred to as a hypothetical protein. An example of SpyM18_{—}0130 is shown in SEQ ID NO: 77.

SEQ ID NO: 77

MRKYWKMLFSVVMILTMLAFNQTVLAKDSTVQTSISVENVLERAGDSTSF
SVALESIDAMKTIDEITIAGSGKASFSPLTFTTVGQYTYRVYQKPSQNKD
YQADTTVFDVLVYVTYDEDGTLVAKVISRRAGDEEKSAITFKPKRLVKPI
PPRQPDIPKTPLPLAGEVKSLLGILSIVLLGLLVLLYVKKLKSRL

[1095] SpyM18_{—}0130 contains an amino acid motif indicative of a cell wall anchor: SEQ ID NO: 185 LPLAG (shown in italics in SEQ ID NO: 77, above). In some recombinant host cell systems, it may be preferable to remove this motif to facilitate secretion of a recombinant SpyM18_{—}0130 protein from the host cell. Alternatively, in other recombinant host cell systems, it may be preferable to use the cell wall anchor motif to anchor the recombinantly expressed protein to the cell wall. The extracellular domain of the expressed protein may be cleaved during purification or the recombinant protein may be left attached to either inactivated host cells or cell membranes in the final composition.

[1096] A pilin motif, discussed above, containing a conserved lysine (K) residue has also been identified in SpyM18_{—}0130. The pilin motif sequence is underlined in SEQ ID NO: 77, below. Conserved lysine (K) residues are also marked in bold, at amino acid residues 144, 159, and 169. The pilin sequence, in particular the conserved lysine residues, are thought to be important for the formation of oligomeric, pilus-like structures. Preferred fragments of SpyM18_{—}0130 include at least one conserved lysine residue. Preferably, fragments include the pilin sequence.

SEQ ID NO: 77

MRKYWKMLFSVVMILTMLAFNQTVLAKDSTVQTSISVENVLERAGDSTSF
SVALESIDAMKTIDEITIAGSGKASFSPLTFTTVGQYTYRVYQKPSQNKD
YQADTTVFDVLVYVTYDEDGTLVAKVISRRAGDEEKSAITFKPKRLVKPI
PPRQPDIPKTPLPLAGEVKSLLGTLSIVLLGLLVLLYVKKLKSRL

[1097] An E box containing a conserved glutamic residue has been identified in SpyM18_{—}0130. The E-box motif is underlined in SEQ ID NO: 77, below. The conserved glutamic acid (E), at amino acid residue 134, is marked in bold. The E box motif, in particular the conserved glutamic acid residue, is thought to be important for the formation of oligomeric pilus-like structures of SpyM18_{—}0130. Preferred fragments of SpyM18_{—}0130 include the conserved glutamic acid residue. Preferably, fragments include the E box motif.

SEQ ID NO: 77

MRKYWKMLFSVVMILTMLAFNQTVLAKDSTVQTSISVENVLERAGDSTSF
SVALESIDAMKTIDEITIAGSGKASFSPLTFTTVGQYTYRVYQKPSQNKD
YQADTTVFDVLVYVTYDEDGTLVAKVISRRAGDEEKSAITFKPKRLVKPI
PPRQPDIPKTPLPLAGEVKSLLGTLSIVLLGLLVLLYVKKLKSRL

[1098] SpyM18_{—}0131 is referred to as a putative multiple sugar metabolism regulator. An example of SpyM18_{—}0131 is set forth in SEQ ID NO: 78.

SEQ ID NO: 78

MAIFDLKHVQTLHSLSQLPISVMSQDKALIQVYGNDDYLLCYYQFLKHLA
IPQAAQDVIFYEGLFEESFMIFPLCHYIIAIGPFYPYSLNKDYQEQLANN
CLKHSSHRSKEELLSYMALVPHFPINNVRNLLIAIDAFFDTQFETTCQQT
IHQLLQHSKQMTADPDIIHRLKHISKASSQLPPVLEHLNHIMDLVKLGNP
QLLKQEINRIPLSSITSSSISALRAEKNLTVIYLTRLLEFSFVENTDVAK
HYSLVKYYMALNEEASDLLKVLRIRCAAIIHFSESLTNKSISDKRQMYNS
VLHYVDSHLYSKLKVSDTAKRLYVSESHLRSVFKKYSNVSLQHYTLSTKT
KEAQLLLKRGIPVGEVAKSLYFYDTTHFHKIFKKYTGISSKDYLAKYRDN
I

[1099] SpyM18_{—}0132 is a F2 like fibronectic-binding protein. An example of SpyM18_{—}0132 is set forth in SEQ ID NO: 79.

SEQ ID NO: 79

MTQKNSYKLSFLLSLTGFILGLLLVFIGLSGVSVGHAETRNGANKQGAFE
IKKNKSQEEYNYEVYDNRNILQDGEHKLEIKRVDGTGKTYQGFCFQLTKN
FPTAQGVSKKLYKKLSSSDEETLKQYASKYTSNRRGDTSGNLKKQIAKVL
TEGYPTNKSDWLNGLTENEKIEVTQDAIWYFTETTVPADRSYTNRNVNSQ
KMKEVYQKLIDTTDIDKYEDVQFDLFVPQDTNLQAVISVEPVIESLPWTS
LKPIAQKDITAKKIWVDAPKEKPIIYFKLYRQLPGEKEVAVDDAELKQIN
SEGQQEISVTWTNQLVTDEKGMAYIYSVKEVDKNGELLEPKDYIKKEDGL
TVTNTYVKPTSGHYDIEVTFGNGHIDITEDTTPDIVSGENQMKQIEGEDS
KPIDEVTENNLIEPGKNTMPGEEDGTNSNKYEEVEDSRPVDTLSGLSSEQ
GQSGDMTIEEDSATHIKFSKRDIDGKELAGATMELRDSSGKTISTWISDG
QVKDFYLMPGKYTFVETAAPDGYEIATAITFTVNEQGQVTVNGKATKGDA
HIVMVDAYKPTKGSGQVIDIEEKLPDEQGHSGSTTEIEDSKSSDVIIGGQ
GQIVETTEDTQTGMHGDSGCKTEVEDTKLVQSFHFDNKESESNSEIPKKD
KPKSNTSLPATGEKQHNMFFWMVTSCSLISSVPVISLKTKKRLSSC

[1100] SpyM18_{—}0132 contains an amino acid motif indicative of a cell wall anchor: SEQ ID NO: 180 LPATG (shown in italics in SEQ ID NO: 79, above). In some recombinant host cell systems, it may be preferable to remove this motif to facilitate secretion of a recombinant SpyM18_{—}0132 protein from the host cell. Alternatively, in other recombinant host cell systems, it may be preferable to use the cell wall anchor motif to anchor the recombinantly expressed protein to the cell wall. The extracellular domain of the expressed protein may be cleaved during purification or the recombinant protein may be left attached to either inactivated host cells or cell membranes in the final composition.

[1101] A pilin motif, discussed above, containing a conserved lysine (K) residue has also been identified in SpyM18_{—}0132. The pilin motif sequence is underlined in SEQ ID NO: 79, below. A conserved lysine (K) residue is also marked in bold, at amino acid residue 270. The pilin sequence, in particular the conserved lysine residue, is thought to be important for the formation of oligomeric, pilus-like structures. Preferred fragments of SpyM18_{—}0132 include the conserved lysine residue. Preferably, fragments include the pilin sequence.

SEQ ID NO: 79

MTQKNSYKLSFLLSLTGFILGLLLVFIGLSGVSVGHAETRNGANKQGAFE
IKKNKSQEEYNYEVYDNRNILQDGEHKLEIKRVDGTGKTYQGFCFQLTKN
FPTAQGVSKKLYKKLSSSDEETLKQYASKYTSNRRGDTSGNLKKQIAKVL
TEGYPTNKSDWLNGLTENEKIEVTQDAIWYFTETTVPADRSYTNRNVNSQ
KMKEVYQKLIDTTDIDKYEDVQFDLFVPQDTNLQAVISVEPVIESLPWTS
LKPIAQKDITAKKIWVDAPKEKPIIYFKLYRQLPGEKEVAVDDAELKQIN
SEGQQEISVTWTNQLVTDEKGMAYIYSVKEVDKNGELLEPKDYIKKEDGL
TVTNTYVKPTSGHYDIEVTFGNGHIDITEDTTPDIVSGENQMKQIEGEDS
KPIDEVTENNLIEPGKNTMPGEEDGTNSNKYEEVEDSRPVDTLSGLSSEQ
GQSGDMTIEEDSATHIKFSKRDIDGKELAGATMELRDSSGKTISTWISDG
QVKDFYLMPGKYTFVETAAPDGYEIATAITFTVNEQGQVTVNGKATKGDA
HIVMVDAYKPTKGSGQVIDIEEKLPDEQGHSGSTTEIEDSKSSDVIIGGQ
GQIVETTEDTQTGMHGDSGCKTEVEDTKLVQSFHFDNKESESNSEIPKKD
KPKSNTSLPATGEKQHNMFFWMVTSCSLISSVPVISLKTKKRLSSC

[1102] An E box containing a conserved glutamic residue has been identified in SpyM18_{—}0132. The E-box motif is underlined in SEQ ID NO: 79, below. The conserved glutamic acid (E), at amino acid residue 516, is marked in bold. The E box motif, in particular the conserved glutamic acid residue, is thought to be important for the formation of oligomeric pilus-like structures of SpyM18_{—}0132. Preferred fragments of SpyM18_{—}0132 include the conserved glutamic acid residue. Preferably, fragments include the E box motif.

SEQ ID NO: 79

MTQKNSYKLSFLLSLTGFILGLLLVFIGLSGVSVGHAETRNGANKQGAFE
IKKNKSQEEYNYEVYDNRNILQDGEHKLEIKRVDGTGKTYQGFCFQLTKN
FPTAQGVSKKLYKKLSSSDEETLKQYASKYTSNRRGDTSGNLKKQIAKVL
TEGYPTNKSDWLNGLTENEKIEVTQDAIWYFTETTVPADRSYTNRNVNSQ
KMKEVYQKLIDTTDIDKYEDVQFDLFVPQDTNLQAVISVEPVIESLPWTS
LKPIAQKDITAKKIWVDAPKEKPIIYFKLYRQLPGEKEVAVDDAELKQIN
SEGQQEISVTWTNQLVTDEKGMAYIYSVKEVDKNGELLEPKDYIKKEDGL
TVTNTYVKPTSGHYDIEVTFGNGHIDITEDTTPDIVSGENQMKQIEGEDS
KPIDEVTENNLIEPGKNTMPGEEDGTNSNKYEEVEDSRPVDTLSGLSSEQ
GQSGDMTIEEDSATHIKFSKRDIDGKELAGATMELRDSSGKTISTWISDG
QVKDFYLMPGKYTFVETAAPDGYEIATAITFTVNEQGQVTVNGKATKGDA
HIVMVDAYKPTKGSGQVIDIEEKLPDEQGHSGSTTEIEDSKSSDVIIGGQ
GQIVETTEDTQTGMHGDSGCKTEVEDTKLVQSFHFDNKESESNSEIPKKD
KPKSNTSLPATGEKQHNMFFWMVTSCSLISSVPVISLKTKKRLSSC

[1103] Examples of GAS AI-3 sequences from M49 strain isolate 591 are set forth below.

[1104] SpyoM01000156 is a negative transcriptional regulator (Nra). An example of SpyoM01000156 is set forth in SEQ ID NO: 243.

SEQ ID NO: 243

MPYVKKKKDSFLVETYLEQSIRDKSELVLLLFKSPTIIFSHVAKQTGLTA
VQLKYYCKELDDEFGNNLDITIKKGKIIGCFVKPVKEFYLHQLYDTSTIL
KLLVFFIKNGTSSQPLIKFSKKYFLSSSSAYRLRESLIKLLREFGLRVSK
NTIVGEEYRIRYLIAMLYSKFGIVIYPLDHLDNQIIYRFLSQSATNLRTS
PWLEEPFSFYNMLLALSWKRHQFAVSIPQTRIFRQLKKLFIYDCLTRSSR
QVIENAFSLTFSQGDLDYLELIYITTNNSEASLQWTPQHIETCCHIFEKN
DTERLLLEPILKRLPQLNHSKQDLIKALMYFSKSFLFNLQHEVIEIPSFS
LPTYTGNSNLYKALKNIVNQWLAQLPGKRHLNEKHLQLFCSHIEQILKNK
QPALTVVLISSNFINAKLLTDTIPRYFSDKGIHFYSFYLLRDDTYQIPSL
KPDLVITHSRLTPFVKNDLVKGVTVAEFSFDNPDYSIASIQNLIYQLKDK
KYQDFLNEQLQ

[1105] SpyoM01000155 is thought to be a collagen binding protein (CPA). An example of SpyoM01000155 is set forth in SEQ ID NO: 244.

SEQ ID NO: 244

MQKRDKTNYGSANNKRRQTTIGLLKVFLTFVALIGIVGESIRAFGAEEQS
VPNRQSSIQDYPWYGYDSYPKGYPDYSPLKTYHNLKVNLEGSKDYQAYCF
NLTKHFPSKSDSVRSQWYKKLEGTNENFIKLADKPRIEDGQLQQNILRIL
YNGYPNNRNGIMKGIDPLNAILVTQNAIWYYTDSAQINPDESFKTEARSN
GINDQQLGLMRKALKELIDPNLGSKYSNKTPSGYRLNVFESHDKTFQNLL
SAEYVPDTPPKPGEEPPAKTEKTSVIIRKYAEGDYSKLLEGATLKLSQIE
GSGFQEKDFQSNSLGETVELPNGTYTLTETSSPDGYKIAEPIKFRVENKK
VETVQKDGSQVENPNKEVAEPYSVEAYNDFMDEEVLSGFTPYGKFYYAKN
KDKSSQVVYCPNADLHSPPDSYDSGETTNPDTSTMKEVKYTHTAGSDLFK
YALRPRDTNPEDFLKHIKKVIEKGYKKKGDSYNGLTETQFRAATQLAIYY
FTDSADLKTLKTYNNGKGYHGFESMDEKTLAVTKELITYAQNGSAPQLTN
LDFFVPNNSKYQSLIGTEYHPDDLVDVTRMEDKKQEVIPVTHSLTVKKTV
VGELGDKTKGFQFELELKDKTGQPIVNTLKTNNQDLVAKDGKYSFNLKHG
DTIRIEGLPTGYSYTLKETEAKDYIVTVDNKVSQEAQSVGKDITEDKKVT
FENRKDLVPPTGLTTDGAIYLWLLLLVPLGLLVWLFGRKGLKND

[1106] SpyoM01000155 contains an amino acid motif indicative of a cell wall anchor: SEQ ID NO: 184 VPPTG (shown in italics in SEQ ID NO: 244, above). In some recombinant host cell systems, it may be preferable to remove this motif to facilitate secretion of a recombinant SpyoM1000155 protein from the host cell. Alternatively, in other recombinant host cell systems, it may be preferable to use the cell wall anchor motif to anchor the recombinantly expressed protein to the cell wall. The extracellular domain of the expressed protein may be cleaved during purification or the recombinant protein may be left attached to either inactivated host cells or cell membranes in the final composition.

[1107] Two pilin motifs, discussed above, containing conserved lysine (K) residues have also been identified in SpyoM01000155. The pilin motif sequence is underlined in SEQ ID NO: 244, below. Conserved lysine (K) residues are also marked in bold, at amino acid residues 71 and 261. The pilin sequences, in particular the conserved lysine residues, are thought to be important for the formation of oligomeric, pilus-like structures. Preferred fragments of SpyoM01000155 include at least one conserved lysine residue. Preferably, fragments include at least one pilin sequence.

SEQ ID NO: 244

MQKRDKTNYGSANNKRRQTTIGLLKVFLTFVALIGIVGFSIRAFGAEEQS
VPNRQSSIQDYPWYGYDSYPKGYPDYSPLKTYHNLKVNLEGSKDYQAYCF
NLTKHFPSKSDSVRSQWYKKLEGTNENFIKLADKPRIEDGQLQQNILRIL
YNGYPNNRNGIMKGIDPLNAILVTQNAIWYYTDSAQINPDESFKTEARSN
GINDQQLGLMRKALKELIDPNLGSKYSNKTPSGYRLNVFESHDKTFQNLL
SAEYVPDTPPKPGEEPPAKTEKTSVIIRKYAEGDYSKLLEGATLKLSQIE
GSGFQEKDFQSNSLGETVELPNGTYTLTETSSPDGYKIAEPIKFRVENKK
VFIVQKDGSQVENPNKEVAEPYSVEAYNDFMDEEVLSGFTPYGKFYYAKN
KDKSSQVVYCFNADLHSPPDSYDSGETINPDTSTMKEVKYTHTAGSDLFK
YALRPRDTNPEDFLKHIKKVIEKGYKKKGDSYNGLTETQFRAATQLAIYY
FTDSADLKTLKTYNNGKGYHGFESMDEKTLAVTKELITYAQNGSAPQLTN
LDFFVPNNSKYQSLIGTEYHPDDLVDVIRMEDKKQEVIPVTHSLTVKKTV
VGELGDKTKGFQFELELKDKTGQPIVNTLKTNNQDLVAKDGKYSFNLKHG
DTIRIEGLPTGYSYTLKETEAKDYIVTVDNKVSQEAQSVGKDITEDKKVT
FENRKDLVPPTGLTTDGAIYLWLLLLVPLGLLVWLFGRKGLKND

[1108] Two E boxes containing conserved glutamic residues have been identified in SpyoM1000155. The E-box motifs are underlined in SEQ ID NO: 244, below. The conserved glutamic acid (E) residues, at amino acid residues 329 and 668, are marked in bold. The E box motifs, in particular the conserved glutamic acid residues, are thought to be important for the formation of oligomeric pilus-like structures of SpyoM01000155. Preferred fragments of SpyoM01000155 include at least one conserved glutamic acid residue. Preferably, fragments include at least one E box motif.

SEQ ID NO: 244

MQKRDKTNYGSANNKRRQTTIGLLKVFLTFVALIGIVGESIRAFGAEEQS
VPNRQSSIQDYPWYGYDSYPKGYPDYSPLKTYHNLKVNLEGSKDYQAYCF
NLTKHFPSKSDSVRSQWYKKLEGTNENFIKLADKPRIEDGQLQQNILRIL
YNGYPNNRNGIMKGIDPLNAILVTQNAIWYYTDSAQINPDESFKTEARSN
GINDQQLGLMRKALKELIDPNLGSKYSNKTPSGYRLNVFESHDKTFQNLL
SAEYVPDTPPKPGEEPPAKTEKTSVIIRKYAEGDYSKLLEGATLKLSQIE
GSGFQEKDFQSNSLGETVELPNGTYTLTETSSPDGYKIAEPIKFRVENKK
VETVQKDGSQVENPNKEVAEPYSVEAYNDFMDEEVLSGFTPYGKFYYAKN
KDKSSQVVYCPNADLHSPPDSYDSGETTNPDTSTMKEVKYTHTAGSDLFK
YALRPRDTNPEDFLKHIKKVIEKGYKKKGDSYNGLTETQFRAATQLAIYY
FTDSADLKTLKTYNNGKGYHGFESMDEKTLAVTKELITYAQNGSAPQLTN
LDFFVPNNSKYQSLIGTEYHPDDLVDVTRMEDKKQEVIPVTHSLTVKKTV
VGELGDKTKGFQFELELKDKTGQPIVNTLKTNNQDLVAKDGKYSFNLKHG
DTIRIEGLPTGYSYTLKETEAKDYIVTVDNKVSQEAQSVGKDITEDKKVT
FENRKDLVPPTGLTTDGAIYLWLLLLVPLGLLVWLFGRKGLKND

[1109] SpyoM01000154 is a LepA protein. An example of SpyoM01000154 is shown in SEQ ID NO: 245.

SEQ ID NO: 245

MTNYLNRLNENSLFKAFIRLVLKISTIGFLGYILFQYVFGVMIINTNDMS
PALSAGDGVLYYRLADRSHINDVVVYEVDNTLKVGRIAAQAGDEVNFTQE
GGLLINGHPPEKEVPYLTYPHSSGPNFPYKVPTGTYFILNDYREERLDSR
YYGALPINQIKGKISTLLRVRGI

[1110] SpyoM01000153 is thought to be a fimbrial protein. An example of SpyoM01000153 is shown in SEQ ID NO: 246.

SEQ ID NO: 246

MKKNKLLLATAILATALGMASMSQNIKAETAGVIDGSTLVVKKTFPSYTD
DNVLMPKADYSFKVEADDNAKGKTKDGLDIKPGVIDGLENTKTIRYSNSD
KITAKEKSVNFEFANVKFPGVGVYRYTVAEVNGNKAGITYDSQQWTVDVY
VVNKEGGGFEVKYIVSTEVGQSEKKPVLFKNSFDTTSLKIEKQVTGNTGE
HQRLFSFTLLLTPNECFEKGQVVNILQGGETKKVVIGEEYSFTLKDKESV
TLSQLPVGIEYKLTEEDVTKDGYKTSATLKDGEQSSTYELGKDHKTDKSA
DEIVVTNKRDTQVPTGVVGTLAPFAVLSIVAIGGVIYITKRKKA

[1111] SpyoM01000153 contains an amino acid motif indicative of a cell wall anchor: SEQ ID NO: 140 QVPTG (shown in italics in SEQ ID NO: 246, above). In some recombinant host cell systems, it may be preferable to remove this motif to facilitate secretion of a recombinant SpyoM01000153 protein from the host cell. Alternatively, in other recombinant host cell systems, it may be preferable to use the cell wall anchor motif to anchor the recombinantly expressed protein to the cell wall. The extracellular domain of the expressed protein may be cleaved during purification or the recombinant protein may be left attached to either inactivated host cells or cell membranes in the final composition.

[1112] A pilin motif, discussed above, containing a conserved lysine (K) residue has also been identified in SpyoM01000153. The pilin motif sequence is underlined in SEQ ID NO: 246, below. A conserved lysine (K) residue is also marked in bold, at amino acid residue 57. The pilin sequence, in particular the conserved lysine residue, is thought to be important for the formation of oligomeric, pilus-like structures. Preferred fragments of SpyoM01000153 include the conserved lysine residue. Preferably, fragments include the pilin sequence.

SEQ ID NO: 246

MKKNKLLLATAILATALGMASMSQNIKAETAGVIDGSTLVVKKTFPSYTD
DNVLMPKADYSFKVEADDNAKGKTKDGLDIKPGVIDGLENTKTIRYSNSD
KITAKEKSVNFEFANVKFPGVGVYRYTVAEVNGNKAGITYDSQQWTVDVY
VVNKEGGGEEVKYIVSTEVGQSEKKPVLFKNSFDTTSLKIEKQVTGNTGE
HQRLFSFTLLLTPNECFEKGQVVNILQGGETKKVVIGEEYSFTLKDKESV
TLSQLPVGIEYKLTEEDVTKDGYKTSATLKDGEQSSTYELGKDHKTDKSA
DEIVVTNKRDTQVPTGVVGTLAPEAVLSIVAIGGVIYITKRKKA

[1113] An E box containing a conserved glutamic residue has been identified in SpyoM01000153. The E-box motif is underlined in SEQ ID NO: 246, below. The conserved glutamic acid (E), at amino acid residue 265, is marked in bold. The E box motif, in particular the conserved glutamic acid residue, is thought to be important for the formation of oligomeric pilus-like structures of SpyoM01000153. Preferred fragments of SpyoM01000153 include the conserved glutamic acid residue. Preferably, fragments include the E box motif.

SEQ ID NO: 246

MKKNKLLLATAILATALGMASMSQNIKAETAGVIDGSTLVVKKTFPSYTD
DNVLMPKADYSFKVEADDNAKGKTKDGLDIKPGVIDGLENTKTIRYSNSD
KITAKEKSVNFEFANVKFPGVGVYRYTVAEVNGNKAGITYDSQQWTVDVY
VVNKEGGGFEVKYIVSTEVGQSEKKPVLFKNSFDTTSLKIEKQVTGNTGE
HQRLFSFTLLLTPNECFEKGQVVNILQGGETKKVVIGEEYSFTLKDKESV
TLSQLPVGIEYKLTEEDVTKDGYKTSATLKDGEQSSTYELGKDHKTDKSA
DEIVVTNKRDTQVPTGVVGTLAPFAVLSIVAIGGVIYITKRKKA

[1114] SpyoM01000152 is a SrtC2 type sortase. An example of SpyoM01000152 is shown in SEQ ID NO: 247

SEQ ID NO: 247

MMMTIVQVINKAIDTLILIFCLVVLFLAGFGLWDSYHLYQQADASNFKKF
KTAQQQPKFEDLLALNEDVIGWLNIPGTHIDYPLVQGKTNLEYINKAVDG
SVAMSGSLFLDTRNHNDFTDDYSLIYGHHMAGNAMFGEIPKFLKKNFFNK
HNKAIIETKERKKLTVTIFACLKTDAFDQLVFNPNAITNQDQQRQLVDYI
SKRSKQFKPVKLKHHTKFVAPSTCENFSTDNRVTVVGTIQE

[1115] SpyoM01000151 is referred to as a hypothetical protein. An example of SpyoM01000151 is shown in SEQ ID NO: 248.

SEQ ID NO: 248

MLFSVVMMLTMLAFNQTVLAKDSTVQTSISVENVLERAGDSTPFSIALES
IDAMKTIEEITIAGSGKASFSPLTFTTVGQYTYRVYQKPSQNKDYQADTT
VFDVLVYVTYDEDGTLVAKVISRRAGDEEKSAITFKPKRLVKPIPPRQPD
IPKTPLPLAGEVKSLLGILSIVLLGLLVLLYVKKLKSRL

[1116] SpyoM01000151 contains an amino acid motif indicative of a cell wall anchor: SEQ ID NO: 185 LPLAG (shown in italics in SEQ ID NO: 248, above). In some recombinant host cell systems, it may be preferable to remove this motif to facilitate secretion of a recombinant SpyoM01000151 protein from the host cell. Alternatively, in other recombinant host cell systems, it may be preferable to use the cell wall anchor motif to anchor the recombinantly expressed protein to the cell wall. The extracellular domain of the expressed protein may be cleaved during purification or the recombinant protein may be left attached to either inactivated host cells or cell membranes in the final composition.

[1117] A pilin motif, discussed above, containing a conserved lysine (K) residue has also been identified in SpyoM01000151. The pilin motif sequence is underlined in SEQ ID NO: 248, below. Conserved lysine (K) residues are also marked in bold, at amino acid residue 138. The pilin sequence, in particular the conserved lysine residue, is thought to be important for the formation of oligomeric, pilus-like structures. Preferred fragments of SpyoM01000151 include the conserved lysine residue. Preferably, fragments include the pilin sequence.

SEQ ID NO: 248

MLFSVVMMLTMLAFNQTVLAKDSTVQTSISVENVLERAGDSTPFSIALES
IDAMKTIEEITIAGSGKASFSPLTFTTVGQYTYRVYQKPSQNKDYQADTT
VFDVLVYVTYDEDGTLVAKVISRRAGDEEKSAITFKPKRLVKPIPPRQPD
IPKTPLPLAGEVKSLLGILSTVLLGLLVLLYVKKLKSRL

[1118] Two E boxes containing conserved glutamic residues have been identified in SpyoM01000151. The E-box motifs are underlined in SEQ ID NO: 248, below. The conserved glutamic acid (E) residues, at amino acid residues 58 and 128, are marked in bold. The E box motifs, in particular the conserved glutamic acid residues, are thought to be important for the formation of oligomeric pilus-like structures of SpyoM01000151. Preferred fragments of SpyoM01000151 include at least one conserved glutamic acid residue. Preferably, fragments include at least one E box motif.

SEQ ID NO: 248

MLFSVVMMLTMLAFNQTVLAKDSTVQTSISVENVLERAGDSTPFSIALES
IDAMKTIEEITIAGSGKASFSPLTFTTVGQYTYRVYQKPSQNKDYQADTT
VFDVLVYVTYDEDGTLVAKVISRRAGDEEKSAITFKPKRLVKPIPPRQPD
IPKTPLPLAGEVKSLLGILSIVLLGLLVLLYVKKLKSRL

[1119] SpyoM01000150 is referred to as a putative MsmRL. An example of SpyoM01000150 is set forth in SEQ ID NO: 249.

SEQ ID NO: 249

MVIFDLKHVQTLHSLSQLPISVMSQDKALIQVYGNDDYLLCYYQFLKHLA
IPQAAQDVIFYEGLFEESFMIFPLCHYIIAIGPFYPYSLNKDYQEQLANN
FLKHSSHRSKEELLSYMALVPHFPINNVRNLLIAIDAFFDTQFETTCQQT
THQLLQHSKQMTADPDIIHRLKHISKASSQLPPVLEHLNHIMDLVKLGNP
QLLKQEINRIPLSSITSSSISALRAEKNLTVIYLTRLLEFSFVENTDVAK
HYSLVKYYMALNEEASDLLKVLRIRCAAIIHFSESLTNKSISDKRQMYNS
VLHYVDSHLYSKLKVSDIAKRLYVSESHLRSVFKKYSNVSLQHYILSTKI
KEAQLLLKRGIPVGEVAKSLYFYDTTHFHKIFKKYTGISSKDYLAKYRDN
I

[1120] SpyoM01000149 is a F2 like fibronectin-binding protein. An example of SpyoM01000149 is set forth in SEQ ID NO: 250.

SEQ ID NO: 250

MTQKNSYKLSFLLSLTGFILGLLLVFIGLSGVSVGHAETRNGANKQGYFE
IKKVDQNNKPLSGATFSLTPKDGKGKPVQTFTSSEEGIIDAQNLQPGTYT
LKEETAPDGYDKTSRTWTVTVYENGYTKLVENPYNGEIISKAGSKDVSSS
LQLENPKMSVVSKYGEQEKTSNSADFYRNHAAYFKMSFELKQKDKSETIN
PGDTFVLQLDRRLNPKGISQDIPKIIYDSENSPLAIGKYDAKTHQLTYTE
TNYIAGLDKVQLSAELSLFLENKEVLENTNISDFKSTIGGQEITYKGTVN
VLYGNESTKESNYITNGLSNVGGSIESYNTETGEFVWYVYVNPNRTNIPY
AVLNLWGFAKRTAQGENDNSSVSSAQLTGYDIYEVPHNYRLPTSYGVDIS
RLNLRKDLEAKLPQGSTQGANKRLRIDFGENLQGKAFVVKVTGKADQSGK
ELIVQSHLSSPNNWGSYKTLRPNSHVSETNEIALSPSKGSGSGTSEETKP
AITVANLKRVAQLRFKKVSTDNVPLPEAAFELRSSNGNSQKLEASSNTQG
EIHPKDLTSGTYDLYETKAPKGYQQVTEKLATVTVDTTKPAEQMVKWEKP
HSFVKVEANKEVTIVNHKETLTFSGKKIWENDRPDQRPAKIQVQLLQNGQ
KMPNQIQEVTKDNDWSYHFKDLPKYDAKNQEYKYSVEEVKVPDGYKVSYL
GNDIFNTRETEFVFEQNNENLEFGNAEIKGQSGSKIIDEDTLTSFKGKKI
WKNDTAENRPQAIQVQLYADGVAVEGQTKFISGSGNEWSFEFKNLKKYNG
TGNDIIYSVKEVTVPTGYDVTYSANDIINTKREVITQQGPNLEIEETLPL
ESGASGGTTTVEDSRSVDTLSGLSSEQGQSGDMTIEEDSATHIKFSKRDI
DGKELAGATMELRDSSGKTISTWISDGQVKDFYLMPGKYTFVETAAPDGY
EIATAITFTVNEQGQVTVNGKATKGDAHIVMVDAYKPTKGSGQVIDIEEK
LPDEQGHSGSTTEIEDSKPSDVIIGGQGEVVDTTEDTQSGMTGHSGSTTE
IEDSKSSDVIIGGQGQVVETTEDTQTGMHGDSGCKTEVEDTKLVQFFHFD
NKEPESNSEIPKKDKPKSNTSLPATGEKQHNKFFWMVTSCSLISSVFVIS
LKSKKRLLSC

[1121] SpyoM01000149 contains an amino acid motif indicative of a cell wall anchor: SEQ ID NO: 180 LPATG (shown in italics in SEQ ID NO: 250, above). In some recombinant host cell systems, it may be preferable to remove this motif to facilitate secretion of a recombinant SpyoM01000149 protein from the host cell. Alternatively, in other recombinant host cell systems, it may be preferable to use the cell wall anchor motif to anchor the recombinantly expressed protein to the cell wall. The extracellular domain of the expressed protein may be cleaved during purification or the recombinant protein may be left attached to either inactivated host cells or cell membranes in the final composition.

[1122] Two pilin motifs, discussed above, containing conserved lysine (K) residues have also been identified in SpyoM01000149. The pilin motif sequences are underlined in SEQ ID NO: 250, below. Conserved lysine (K) residues are also marked in bold, at amino acid residues 157 and 163, and 216 and 224. The pilin sequences, in particular the conserved lysine residues, are thought to be important for the formation of oligomeric, pilus-like structures. Preferred fragments of SpyoM01000149 include at least one conserved lysine residue. Preferably, fragments include at least one pilin sequence.

SEQ ID NO: 250

MTQKNSYKLSFLLSLTGFILGLLLVFIGLSGVSVGHAETRNGANKQGYFE
IKKVDQNNKPLSGATFSLTPKDGKGKPVQTFTSSEEGIIDAQNLQPGTYT
LKEETAPDGYDKTSRTWTVTVYENGYTKLVENPYNGEIISKAGSKDVSSS
LQLENPKMSVVSKYGEQEKTSNSADFYRNHAAYFKMSFELKQKDKSETIN
PGDTFVLQLDRRLNPKGISQDIPKIIYDSENSPLAIGKYDAKTHQLTYTE
TNYIAGLDKVQLSAELSLFLENKEVLENTNISDFKSTIGGQEITYKGTVN
VLYGNESTKESNYITNGLSNVGGSIESYNTETGEFVWYVYVNPNRTNIPY
AVLNLWGFAKRTAQGENDNSSVSSAQLTGYDIYEVPHNYRLPTSYGVDIS
RLNLRKDLEAKLPQGSTQGANKRLRIDFGENLQGKAFVVKVTGKADQSGK
ELIVQSHLSSPNNWGSYKTLRPNSHVSETNEIALSPSKGSGSGTSEETKP
AITVANLKRVAQLRFKKVSTDNVPLPEAAFELRSSNGNSQKLEASSNTQG
EIHPKDLTSGTYDLYETKAPKGYQQVTEKLATVTVDTTKPAEQMVKWEKP
HSFVKVEANKEVTIVNHKETLTFSGKKIWENDRPDQRPAKIQVQLLQNGQ
KMPNQIQEVTKDNDWSYHFKDLPKYDAKNQEYKYSVEEVKVPDGYKVSYL
GNDIFNTRETEFVFEQNNENLEFGNAEIKGQSGSKIIDEDTLTSFKGKKI
WKNDTAENRPQAIQVQLYADGVAVEGQTKFISGSGNEWSFEFKNLKKYNG
TGNDIIYSVKEVTVPTGYDVTYSANDIINTKREVITQQGPNLEIEETLPL
ESGASGGTTTVEDSRSVDTLSGLSSEQGQSGDMTIEEDSATHIKFSKRDI
DGKELAGATMELRDSSGKTISTWISDGQVKDFYLMPGKYTFVETAAPDGY
EIATAITFTVNEQGQVTVNGKATKGDAHIVMVDAYKPTKGSGQVIDIEEK
LPDEQGHSGSTTEIEDSKPSDVIIGGQGEVVDTTEDTQSGMTGHSGSTTE
IEDSKSSDVIIGGQGQVVETTEDTQTGMHGDSGCKTEVEDTKLVQFFHFD
NKEPESNSEIPKKDKPKSNTSLPATGEKQHNKFFWMVTSCSLISSVFVIS
LKSKKRLLSC

[1123] Two E boxes containing conserved glutamic residues have been identified in SpyoM01000149. The E-box motifs are underlined in SEQ ID NO: 250, below. The conserved glutamic acid (E) residues, at amino acid residues 329 and 668, are marked in bold. The E box motifs, in particular the conserved glutamic acid residues, are thought to be important for the formation of oligomeric pilus-like structures of SpyoM01000149. Preferred fragments of SpyoM01000149 include at least one conserved glutamic acid residue. Preferably, fragments include at least one E box motif.

SEQ ID NO: 250

MTQKNSYKLSFLLSLTGFILGLLLVFIGLSGVSVGHAETRNGANKQGYFE
IKKVDQNNKPLSGATFSLTPKDGKGKPVQTFTSSEEGIIDAQNLQPGTYT
LKEETAPDGYDKTSRTWTVTVYENGYTKLVENPYNGEIISKAGSKDVSSS
LQLENPKMSVVSKYGEQEKTSNSADFYRNHAAYFKMSFELKQKDKSETIN
PGDTFVLQLDRRLNPKGISQDIPKIIYDSENSPLAIGKYDAKTHQLTYTE
TNYIAGLDKVQLSAELSLFLENKEVLENTNISDFKSTIGGQEITYKGTVN
VLYGNESTKESNYITNGLSNVGGSIESYNTETGEFVWYVYVNPNRTNIPY
AVLNLWGFAKRTAQGENDNSSVSSAQLTGYDIYEVPHNYRLPTSYGVDIS
RLNLRKDLEAKLPQGSTQGANKRLRIDFGENLQGKAFVVKVTGKADQSGK
ELIVQSHLSSPNNWGSYKTLRPNSHVSETNEIALSPSKGSGSGTSEETKP
AITVANLKRVAQLRFKKVSTDNVPLPEAAFELRSSNGNSQKLEASSNTQG
EIHPKDLTSGTYDLYETKAPKGYQQVTEKLATVTVDTTKPAEQMVKWEKP
HSFVKVEANKEVTIVNHKETLTFSGKKIWENDRPDQRPAKIQVQLLQNGQ
KMPNQIQEVTKDNDWSYHFKDLPKYDAKNQEYKYSVEEVKVPDGYKVSYL
GNDIFNTRETEFVFEQNNENLEFGNAEIKGQSGSKIIDEDTLTSFKGKKI
WKNDTAENRPQAIQVQLYADGVAVEGQTKFISGSGNEWSFEFKNLKKYNG
TGNDIIYSVKEVTVPTGYDVTYSANDIINTKREVITQQGPNLEIEETLPL
ESGASGGTTTVEDSRSVDTLSGLSSEQGQSGDMTIEEDSATHIKFSKRDI
DGKELAGATMELRDSSGKTISTWISDGQVKDFYLMPGKYTFVETAAPDGY
EIATAITFTVNEQGQVTVNGKATKGDAHIVMVDAYKPTKGSGQVIDIEEK
LPDEQGHSGSTTEIEDSKPSDVIIGGQGEVVDTTEDTQSGMTGHSGSTTE
IEDSKSSDVIIGGQGQVVETTEDTQTGMHGDSGCKTEVEDTKLVQFFHFD
NKEPESNSEIPKKDKPKSNTSLPATGEKQHNKFFWMVTSCSLISSVFVIS
LKSKKRLLSC

[1124] As discussed above, applicants have also determined the nucleotide and encoded amino acid sequence of fimbrial structural subunits in several other GAS AI-3 strains of bacteria. Examples of sequences of these fimbrial structural subunits are set forth below.

[1125] M3 strain isolate ISS 3040 is a GAS AI-3 strain of bacteria. ISS3040_fimbrial is thought to be a fimbrial structural subunit of M3 strain isolate ISS 3040. An example of a nucleotide sequence encoding the ISS3040_fimbrial protein (SEQ ID NO: 263) and an ISS3040_fimbrial protein amino acid sequence (SEQ ID NO: 264) are set forth below.

SEQ ID NO: 263

gagacggcaggagtgtccgaaaatgcaaaattaatagtaaaaaagacatt
tgactcttatacagacaatgaagttttaatgccaaaagctgattatactt
ttaaagtagaggcagatagtacagctagtggcaaaacgaaagacggttta
gagattaagccaggtattgttaatggtttaacagaacagattaccagcta
tactaatactgataaaccagatagtaaagttaaaagtacagagtttgatt
tttcaaaagtagtattccctggtattggtgtttaccgctatactgtttca
gaaaaacaaggtgatgttgaaggaattacctacgatactaagaagtggac
agtagatgtttatgttggaaacaaagaaggtggtggttttgaacctaagt
ttattgtatctaaggaacaaggaacagacgtcaaaaaaccagttaatttt
aacaactcgtttgcaactacttcgttaaaagttaagaagaatgtatcggg
gaatactggagaattgcaaaaagaatttgactttacattgacgcttaatg
aaagcacgaattttaaaaaagatcaaattgtttctttacaaaaaggaaac
gagaaatttgaagttaagattggtactccctacaagtttaaactcaaaaa
tggggaatctattcaactagacaagttaccagttggtattacttataaag
tcaatgaaatggaagctaataaagatgggtataaaacaacagcatccttg
aaagagggagatggtcaatctaaaatgtatcaattggatatggaacaaaa
aacagacgaatctgctgacgaaatcgttgtcacaaataagcgtgacactc
aagttccaactggtgttgtaggcacccttgctccatttgcagttcttagc

SEQ ID NO: 264

ETAGVSENAKLIVKKTFDSYTDNEVLMPKADYTFKVEADSTASGKTKDGL
EIKPGIVNGLTEQIISYTNTDKPDSKVKSTEFDFSKVVFPGIGVYRTVSE
KQGDVEGITYDTKKWTVDVYVGNKEGGGFEPKFIVSKEQGTDVKKPVNFN
NSFATTSLKVKKNVSGNTGELQKEFDFTLTLNESTNFKKDQIVSLQKGNE
KFEVKIGTPYKFKLKNGESIQLDKLPVGITYKVNEMEANKDGYKTTASLK
EGDGQSKMYQLDMEQKTDESADEIVVTNKRDTQVPTGVVGTLAPFAVLS

[1126] M44 strain isolate ISS 3776 is a GAS AI-3 strain of bacteria. ISS3776_fimbrial is thought to be a fimbrial structural subunit of M44 isolate ISS 3776. An example of a nucleotide sequence encoding the ISS3776_fimbrial protein (SEQ ID NO: 253) and an ISS3776_fimbrial protein amino acid sequence (SEQ ID NO: 254) are set forth below.

SEQ ID NO: 253

ttggagagagaaaaaatgaaaaaaaacaaattattacttgctactgcaat
cttagcaactgctttaggaacagcttctttaaatcaaaacgtaaaagctg
agacggcaggggttgtaacaggaaaatcactacaagttacaaagacaatg
acttatgatgatgaagaggtgttaatgcccgaaaccgcctttacttttac
tatagagcctgatatgactgcaagtggaaaagaaggcagcctagatatta
aaaatggaattgtagaaggcttagacaaacaagtaacagtaaaatataag
aatacagataaaacatctcaaaaaactaaaatagcacaatttgatttttc
taaggttaaatttccagctataggtgtttaccgctatatggtttcagaga
aaaacgataaaaaagacggaattacgtacgatgataaaaagtggactgta
gatgtttatgttgggaataaggccaataacgaagaaggtttcgaagttct
atatattgtatcaaaagaaggtacttctagtactaaaaaaccaattgaat
ttacaaactctattaaaactacttccttaaaaattgaaaaacaaataact
ggcaatgcaggagatcgtaaaaaatcattcaacttcacattaacattaca
accaagtgaatattataaaactggatcagttgtgaaaatcgaacaggatg
gaagtaaaaaagatgtgacgataggaacgccttacaaatttactttggga
cacggtaagagtgtcatgttatcgaaattaccaattggtatcaattacta
tcttagtgaagacgaagcgaataaagacggctacactacaacggcaacat
taaaagaacaaggcaaagaaaagagttccgatttcactttgagtactcaa
aaccagaaaacagacgaatctgctgacgaaatcgttgtcacaaataagcg
tgacactcaagttccaactggtgttgtagggacccttgctccatttgcag
ttcttagcattgtggctattggtggagttatctatattacaaaacgtaaa
aaagcttaa

SEQ ID NO: 254

MEREKMKKNKLLLATAILATALGTASLNQNVKAETAGVVTGKSLQVTKTM
TYDDEEVLMPETAFTFTIEPDMTASGKEGSLDIKNGIVEGLDKQVTVKYK
NTDKTSQKTKIAQFDFSKVKFPAIGVYRYMVSEKNDKKDGTTYDDKKWTV
DVYVGNKANNEEGFEVLYIVSKEGTSSTKKPIEFTNSIKTTSLKIEKQIT
GNAGDRKKSFNFTLTLQPSEYYKTGSVVKIEQDGSKKDVTIGTPYKFTLG
HGKSVMLSKLPIGINYYLSEDEANKDGYTTTATLKEQGKEKSSDFTLSTQ
NQKTDESADEIVVTNKRDTQVPTGVVGTLAPFAVLSIVAIGGVIYTTKRK
KA

[1127] M77 strain isolate ISS4959 is a GAS AI-3 strain of bacteria. ISS4959_fimbrial is thought to be a fimbrial structural subunit of M77 strain ISS 4959. An example of a nucleotide sequence encoding the ISS4959_fimbrial protein (SEQ ID NO: 271) and an ISS4959_fimbrial protein amino acid sequence (SEQ ID NO: 272) are set forth below.

SEQ ID NO: 271

gtaacagtaaaatataagaatacagataaaacatctcaaaaaactaaaat
agcacaatttgatttttctaaggttaaatttccagctataggtgtttacc
gctatatggtttcagagaaaaacgataaaaaagacggaattacgtacgat
gataaaaagtggacngtagatgtttatgttgggaataaggccaataacga
agaaggtttcgaagttctatatattgtatcaaaagaaggtacttctagtn
ctaaaaaaccaattgaatttacaaactctattaaaactacttccttaaaa
attgaaaaacaaataactggcaatgcaggagatcgtaaaaaatcattcaa
cttcacattnacattacanccaagtgaatattataaaactggatcagttg
tgaaaatcgaacaggatggaagtaaaaaagatgtgacgataggaacgcct
tacaaatttactttgggacacggtaagagtgtcatgttatcgaaattncc
aattggtatcaattactatcttagtgaagacgaagcgaataaagacggnt
acactacancggcaacattaaaagaacaaggcaaagaaaagagttccgat
ttcactttgagtactcaaaaccagaaaacagacgaatctgctg

SEQ ID NO: 272

VTVKYKNTDKTSQKTKIAQFDFSKVKFPAIGVYRYMVSEKNDKKDGITYD
DKKWTVDVYVGNKANNEEGREVLYIVSKEGTSSXKKPIEFTNSIKTTSLK
IEKQITGNAGDRKKSFNFTXTLXPSEYYKTGSVVKIEQDGSKKDVTIGTP
YKFTLGHGKSVNLSKXPIGINYYLSEDEANKDGYTTXATLKEQGKEKSSD
FTLSTQNQKTDESA

[1128] Examples of GAS AI-4 sequences from M12 strain isolate A735 are set forth below.

[1129] 19224133 is thought to be a RofA regulatory protein. An example of a nucleotide sequence encoding the RofA regulatory protein (SEQ ID NO: 104) and a RofA regulatory protein amino acid sequence (SEQ ID NO: 105) are set forth below.

SEQ ID NO: 104

ATGACCATCCAAAAAAGGATGATATCTTGCCAATTTACACATCCTTCTAA
AGAAACTTATCTTTACCAACTCTATGCATCATCTAATGTCTTACAATTAC
TAGCGTTTTTAATAAAAAATGGTTCCCACTCTCGTCCCCTTACGGATTTT
GCAAGAAGTCATTTTTTATCAAACTCCTCAGCTTATCGGATGCGCGAAGC
ATTGATTCCTTTATTAAGAAACTTTGAATTAAAACTCTCTAAGAACAAGA
TTGTCGGTGAGGAATATCGTATCCGTTACCTCATCGCTCTGCTATATAGT
AAGTTTGGCATTAAAGTTTATGACTTGACGCAGCAAGACAAAAACATTAT
TCATAGCTTTTTATCCCATAGTTCCACCCACCTTAAAACTTCTCCTTGGT
TATCGGAATCGTTTTCTTTCTATGACATTTTATTAGCTTTATCGTGGAAG
CGGCATCAATTTTCGGTAACTATTCCCCAAACCAGAATTTTTCAACAATT
AAAAAAACTTTTTGTCTACGATTCTTTGAAAAAAAGTAGCCGTGATATTA
TCGAAACTTACTGCCAACTAAACTTTTCAGCAGGAGATTTGGACTACCTC
TATTTAATTTATATCACCGCTAATAATTCTTTTGCGAGCTTACAATGGAC
ACCTGAGCATATCAGACAATGTTGTCAACTTTTTGAAGAAAATGATACTT
TTCGCCTGCTTTTAAATCCTATCATCACTCTTTTACCTAACCTAAAAGAG
CAAAAGGCTAGTTTAGTAAAAGCTCTTATGTTTTTTTCAAAATCATTCTT
GTTTAATCTGCAACATTTTATTCCTACAGATTCTTTCCCAAGGTATTTCT
CGGATAAAAGCATTGATTTTCATTCCTATTATCTATTGCAAGATAATGTT
TATCAAATTCCTGATTTAAAGCCAGATTTGGTCATCACTCACAGTCAACT
GATTCCTTTTGTTCACCATGAACTTACAAAAGGAATTGCTGTTGCTGAAA
TATCTTTTGATGAATCGATTCTGTCTATCCAAGAATTGATGTATCAAGTT
AAAGAGGAAAAATTCCAAGCTGATTTAACCAAACAATTAACATAA

SEQ ID NO: 105

MTIQKRMISCQFTHPSKETYLYQLYASSNVLQLLAFLIKNGSHSRPLTDF
ARSHFLSNSSAYRMREALIPLLRNFELKLSKNKIVGEEYRIRYLIALLYS
KFGIKVYDLTQQDKNIIHSFLSHSSTHLKTSPWLSESFSFYDILLALSWK
RHQFSVTIPQTRIFQQLKKLFVYDSLKKSSRDIIETYCQLNFSAGDLDYL
YLIYITANNSFASLQWTPEHIRQCCQLFEENDTFRLLLNPIITLLPNLKE
QKASLVKALMFFSKSFLFNLQHFIPETNLFVSPYYKGNQKLYTSLKLIVE
EWMAKLPGKRYLNHKHFHLFCHYVEQILRNIQPPLVVVFVASNFINAHLL
TDSFPRYFSDKSIDFHSYYLLQDNVYQIPDLKPDLVITHSQLIPFVHHEL
TKGTAVAEISFDESTLSIQELMYQVKEEKFQADLTKQLT

[1130] 19224134 is thought to be a protein F fibronectin binding protein. An example of a nucleotide sequence encoding the protein F fibronectin binding protein (SEQ ID NO: 106) and a protein F fibronectin binding protein amino acid sequence (SEQ ID NO: 107) are set forth below.

SEQ ID NO: 106

ATGGTAAGCTCATATATGTTTGCGAGAGGAGAGAAAATGAATAACAAAAT
GTTTTTGAACAAAGAAGCCGGTTTTTTGGTACACACAAAAAGAAAAAGGC
GATTTGCTGTCACTTTAGTGGGAGTCTTTTTTCTGCTTTTGGCATGTGCG
GGTGCTATCGGTTTTGGTCAAGTAGCCTATGCTGCGGATGAGAAGACTGT
GCCGAATTTTAAAAGCCCAGATCCAGATTATCCCTGGTATGGTTATGATT
CGTATAGAGGAATATTTGCAAGATATCACAATTTAAAAGTAAATCTAAAA
GGAAGTAAGGAGTATCAAGCGTATTGTTTTAACCTAACAAAATACTTTCC
TCGCCCCACTTATAGTACTACAAATAATTTTTACAAGAAAATTGATGGGA
GTGGATCAGCGTTCAAATCTTATGCAGCGAATCCTAGGGTTTTAGATGAG
AATTTAGATAAATTAGAAAAAAATATACTGAATGTAATTTATAATGGATA
TAAAAGTAATGCAAATGGTTTTATGAATGGTATAGAAGATCTTAATGCTA
TACTAGTAACTCAAAACGCTATTTGGTACTATTCAGATAGTGCTCCATTA
AATGATGTTAATAAAATGTGGGAAAGAGAGGTTCGGAATGGGGAGATTAG
TGAGTCACAAGTTACTTTAATGCGTGAGGCATTGAAAAAACTAATTGATC
CCAATTTAGAAGCTACTGCAGCTAATAAAATCCCATCAGGATATCGTTTA
AATATCTTTAAGTCTGAAAATGAAGATTACCAAAATCTTTTAAGTGCTGA
ATATGTACCTGATGATCCCCCTAAACCTGGTGATACGTCAGAACATAATC
CTAAAACTCCCGAGTTGGATGGCACTCCAATTCCCGAGGACCCAAAACGT
CCAGATGAGAGTTCAGAACCTGCGCTTCCCCCATTAATGCCAGAGCTAGA
TGGTGAAGAAGTCCCAGAAGTTCCAAGCGAGAGCTTAGAACCTGCGCTTC
CCCCATTGATGCCAGAGCTAGATGGTGAAGAAGTCCCAGAAGTTCCAAGC
GAGAGCTTAGAACCTGCGCTTCCCCCATTGATGCCAGAGCTAGATGGTGA
AGAAGTCCCAGAAGTTCCAAGCGAGAGCTTAGAACCTGCGCTTCCCCCAT
TAATGCCAGAGCTAGATGGTGAAGAAGTCCCAGAAGTTCCAAGCGAGAGC
TTAGAACCTGCGCTTCCCCCATTGATGCCAGAGTTAGATGGTGAAGAAGT
CCCTGAAAAACCTAGTGTTGACTTACCTATTGAAGTTCCTCGTTATGAGT
TTAACAATAAAGACCAGTCACCTCTAGCGGGTGAGTCTGGTGAGACGGAG
TATATTACCGAAGTCTATGGAAATCAACAGAACCCTGTTGATATTGATAA
AAAACTTCCGAATGAAACAGGTTTTTCAGGAAATATGGTTGAGACAGAAG
ATACGAAAGAGCCAGAAGTGTTGATGGGAGGTCAAAGTGAGTCTGTTGAA
TTTACTAAAGACACTCAAACAGGCATGAGTGGTCAAACAACTCCTCAGGT
TGAGACAGAAGATACGAAAGAGCCAGAAGTGTTGATGGGAGGTCAAAGTG
AGTCTGTTGAATTTACTAAAGACACTCAAACAGGCATGAGTGGTCAAACA
ACTCCTCAGGTTGAGACAGAAGATACGAAAGAGCCAGGAGTGTTGATGGG
AGGCCAAAGTGAGTCTGTTGAATTTACTAAAGACACTCAAACAGGCATGA
GTGGTCAAACAACTCCTCAGGTTGAGACAGAAGACACGAAAGAGCCAGGA
AATCGGGAAAAGCCTACAAAAAATATAACACCTATCCTTCCTGCAACAGG
AGATATTGAGAATGTTTTGGCCTTTCTTGGAATCCTTATTTTGTCAGTAC
TTTCTATTTTTAGCCTTTTAAAAACAAACAAAACAATAAAGTCTGA

SEQ ID NO: 107

MVSSYMFARGEKMNNKMFLNKEAGFLVHTKRKRRFAVTLVGVFFLLLACA
GAIGFGQVAYAADEKTVPNFKSPDPDYPWYGYDSYRGIFARYHNLKVNLK
GSKEYQAYCFNLTKYFPRPTYSTTNNFYKKIDGSGSAFKSYAANPRVLDE
NLDKLEKNILNVIYNGYKSNANGFMNGIEDLNAILVTQNAIWYYSDSAPL
NDVNKMWEREVRNGEISESQVTLMREALKKLTDPNLEATAANKIPSGYRL
NIFKSENEDYQNLLSAEYVPDDPPKPGDTSEHNPKTPELDGTPIPEDPKR
PDESSEPALPPLMPELDGEEVPEVPSESLEPALPPLMPELDGEEVPEVPS
ESLEPALPPLMPELDGEEVPEVPSESLEPALPPLMPELDGEEVPEVPSES
LEPALPPLMPELDGEEVPEKPSVDLPIEVPRYEFNNKDQSPLAGESGETE
YITEVYGNQQNPVDIDKKLPNETGFSGNMVETEDTKEPEVLMGGQSESVE
FTKDTQTGMSGQTTPQVETEDTKEPEVLMGGQSESVEETKDTQTGMSGQT
TPQVETEDTKEPGVLMGGQSESVEFTKDTQTGMSGQTTPQVETEDTKEPG
VLMGGQSESVEFTKDTQTGMSFFSETVTIVEDTRPKLVFHFDNNEPKVEE
NREKPTKNITPILPATGDIENVLAFLGILILSVLSIFSLLKNKQNNKV

[1131] 19224134 contains an amino acid motif indicative of a cell wall anchor: SEQ ID NO: 181 LPATG (shown in italics in SEQ ID NO: 107, above). In some recombinant host cell systems, it may be preferable to remove this motif to facilitate secretion of a recombinant 19224134 protein from the host cell. Alternatively, in other recombinant host cell systems, it may be preferable to use the cell wall anchor motif to anchor the recombinantly expressed protein to the cell wall. The extracellular domain of the expressed protein may be cleaved during purification or the recombinant protein may be left attached to either inactivated host cells or cell membranes in the final composition.

[1132] A pilin motif, discussed above, containing a conserved lysine (K) residue has also been identified in 19224134. The pilin motif sequence is underlined in SEQ ID NO: 107, below. Conserved lysine (K) residues are also marked in bold, at amino acid residues 275, 285, and 299. The pilin sequence, in particular the conserved lysine residues, are thought to be important for the formation of oligomeric, pilus-like structures. Preferred fragments of 19224134 include at least one conserved lysine residue. Preferably, fragments include the pilin sequence.

SEQ ID NO: 107

MVSSYMFARGEKMNNKMFLNKEAGFLVHTKRKRRFAVTLVGVFFLLLACA
GAIGFGQVAYAADEKTVPNFKSPDPDYPWYGYDSYRGIFARYHNLKVNLK
GSKEYQAYCFNLTKYFPRPTYSTTNNFYKKIDGSGSAFKSYAANPRVLDE
NLDKLEKNTLNVIYNGYKSNANGFMNGIEDLNAILVTQNAIWYYSDSAPL
NDVNKMWEREVRNGEISESQVTLMREALKKLIDPNLEATAANKIPSGYRL
NIFKSENEDYQNLLSAEYVPDDPPKPGDTSEHNPKTPELDGTPIPEDPKR
PDESSEPALPPLMPELDGEEVPEVPSESLEPALPPLMPELDGEEVPEVPS
ESLEPALPPLMPELDGEEVPEVPSESLEPALPPLMPELDGEEVPEVPSES
LEPALPPLMPELDGEEVPEKPSVDLPIEVPRYEFNNKDQSPLAGESGETE
YITEVYGNQQNPVDIDKKLPNETGFSGNMVETEDTKEPEVLMGGQSESVE
FTKDTQTGMSGQTTPQVETEDTKEPEVLMGGQSESVEFTKDTQTGMSGQT
TPQVETEDTKEPGVLMGGQSESVEFTKDTQTGMSGQTTPQVETEDTKEPG
VLMGGQSESVEFTKDTQTGMSGFSETVTIVEDTRPKLVEHFDNNEPKVEE
NREKPTKNITPILPATGDIENVLAFLGILILSVLSIPSLLKNKQNNKV

[1133] Two E boxes containing conserved glutamic residues have been identified in 19224134. The E-box motifs are underlined in SEQ ID NO: 107, below. The conserved glutamic acid (E) residues, at amino acid residues 487 and 524, are marked in bold. The E box motifs, in particular the conserved glutamic acid residues, are thought to be important for the formation of oligomeric pilus-like structures of 19224134. Preferred fragments of 19224134 include at least one conserved glutamic acid residue. Preferably, fragments include at least one E box motif.

SEQ ID NO: 107

MVSSYMFARGEKMNNKMFLNKEAGFLVHTKRKRRFAVTLVGVFFLLLACA
GAIGFGQVAYAADEKTVPNFKSPDPDYPWYGYDSYRGIFARYHNLKVNLK
GSKEYQAYCFNLTKYFPRPTYSTTNNFYKKIDGSGSAFKSYAANPRVLDE
NLDKLEKNTLNVIYNGYKSNANGFMNGIEDLNAILVTQNAIWYYSDSAPL
NDVNKMWEREVRNGEISESQVTLMREALKKLIDPNLEATAANKIPSGYRL
NIFKSENEDYQNLLSAEYVPDDPPKPGDTSEHNPKTPELDGTPIPEDPKR
PDESSEPALPPLMPELDGEEVPEVPSESLEPALPPLMPELDGEEVPEVPS
ESLEPALPPLMPELDGEEVPEVPSESLEPALPPLMPELDGEEVPEVPSES
LEPALPPLMPELDGEEVPEKPSVDLPIEVPRYEFNNKDQSPLAGESGETE
YITEVYGNQQNPVDIDKKLPNETGFSGNMVETEDTKEPEVLMGGQSESVE
FTKDTQTGMSGQTTPQVETEDTKEPEVLMGGQSESVEFTKDTQTGMSGQT
TPQVETEDTKEPGVLMGGQSESVEFTKDTQTGMSGQTTPQVETEDTKEPG
VLMGGQSESVEFTKDTQTGMSGFSETVTIVEDTRPKLVEHFDNNEPKVEE
NREKPTKNITPILPATGDIENVLAFLGILILSVLSIPSLLKNKQNNKV

[1134] 19224135 is thought to be a capsular polysaccharide adhesin (Cpa) protein. An example of a nucleotide sequence encoding the Cpa protein (SEQ ID NO: 108) and a Cpa protein amino acid sequence (SEQ ID NO: 109) are set forth below.

SEQ ID NO: 108

ATGAATAACAAAAAATTGCAAAAGAAGCAAGATGCTCCTCGGGTATCAAA
CAGAAAGCCAAAACAATTAACTGTCACTTTAGTGGGAGTATTTTTAATGT
TTTTGACCTTGGTAAGTTCCATGAGAGGTGCTCAAAGCATATTTGGAGAG
GAAAAGAGAATTGAAGAAGTCAGTGTTCCTAAAATAAAAAGTCCAGATGA
TGCCTACCCTTGGTATGGCTATGATTCATATGACTCTAGTCATCCTTACT
ATGAACGTTTTAAAGTAGCACATGATTTAAGGGTTAATTTAAATGGAAGT
AAGAGCTACCAAGTATATTGCTTTAATATCAATTCTCATTATCCGAATAG
AAAAAATGCTTTTTCTAAACAATGGTTTAAGAGAGTTGATGGGACAGGTG
ATGTGTTCACAAATTATGCTCAGACACCTAAGATTCGTGGAGAATCATTG
AATAATAAACTTTTAAGTATTATGTACAACGCTTATCCTAAAAATGCTAA
TGGCTATATGGATAAGATAGAACCATTAAATGCTATTTTAGTAACTCAAC
AAGCTGTTTGGTACTATTCTGACAGTTCTTATGGTAATATAAAAACGTTA
TGGGCATCTGAGCTTAAAGACGGAAAAATAGATTTTGAACAAGTAAAATT
AATGCGTGAAGCTTACTCAAAACTAATTAGTGATGATTTAGAAGAAACAT
CTAAAAATAAGCTACCTCAAGGATCTAAACTGAATATTTTTGTTCCGCAA
GATAAATCTGTTCAAAATTTATTAAGTGCAGAGTACGTGCCTGAATCCCC
TCCGGCACCAGGTCAGTCTCCAGAACCGCCAGTGCAAACAAAAAAAACAT
CAGTCATTATCAGAAAATATGCGGAAGGTGACTACTCTAAACTTCTAGAG
GGAGCAACTTTGCGTTTAACAGGGGAAGATATCCTAGATTTTCAAGAAAA
AGTCTTCCAAAGTAATGGAACAGGAGAAAAGATTGAATTATCAAATGGGA
CTTATACCTTAACAGAAACATCATCTCCAGATGGATATAAAATTGCGGAG
CCGATTAAGTTTAGAGTAGTGAATAAAAAAGTATTTATCGTCCAAAAAGA
TGGTTCTCAAGTGGAAAATCCAAACAAAGAAGTAGCAGAGCCATACTCAG
TGGAAGCGTACAGCGATATGCAAGATAGTAACTATATTAATCCAGAAACG
TTCACTCCTTATGGGAAATTTTATTACGCTAAAAATAAGGATAAAAGTTC
ACAAGTTGTCTACTGTTTTAATGCTGATTTACACTCTCCACCTGAATCAG
AGGATGGGGGAGGAACTATAGATCCTGATATTAGTACGATGAAAGAAGTC
AAGTACACACATACGGCAGGTAGTGATTTGTTTAAATACGCGCTAAGACC
GAGAGATACAAATCCAGAAGACTTCTTAAAGCACATTAAAAAAGTAATTG
AAAAAGGCTACAATAAAAAAGGTGATAGCTATAATGGATTAACAGAAACA
CAGTTTCGCGCGGCTACTCAGCTTGCTATCTATTACTTTACAGACAGCAC
TGACTTAAAAACCTTAAAAACTTATAACAATGGGAAAGGTTACCATGGAT
TTGAATCTATGGATGAAAAAACCCTAGCTGTAACAAAAGAATTAATTAAT
TACGCTCAAGATAATAGTGCCCCTCAACTAACAAATCTTGATTTCTTCGT
ACCTAATAATAGCAAATACCAATCTCTTATTGGGACAGAATACCATCCAG
ATGATTTGGTTGACGTGATTCGTATGGAAGATAAAAAGCAAGAAGTTATT
CCAGTAACTCACAGTTTGACAGTGAAAAAAACAGTAGTCGGTGAGTTGGG
AGATAAAACTAAAGGCTTCCAATTTGAACTTGAGTTGAAAGATAAAACTG
GACAGCCTATTGTTAACACTCTAAAAACTAATAATCAAGATTTAGTAGCT
AAAGATGGGAAATATTCATTTAATCTAAAGCATGGTGACACCATAAGAAT
AGAAGGATTACCGACGGGATATTCTTATACTCTGAAAGAGACTGAAGCTA
AGGATTATATAGTAACCGTTGATAACAAAGTTAGTCAAGAAGCTCAATCA
GCAAGTGAGAATGTCACAGCAGACAAAGAAGTCACTTTTGAAAACCGTAA
AGATCTTGTCCCACCAACTGGTTTTATTACTGATGGTGGAACCTATGTGT
GGTTATTATTGCTTGTCGCATTTGGTTTGTTAGTGTGGTTCTTTGGTGGT
AAAGGACTAAAAAATGACTAA

SEQ ID NO: 109

MNNKKLQKKQDAPRVSNRKPKQLTVTLVGVFLMELTLVSSMRGAQSIFGE
EKRIEEVSVPKIKSPDDAYPWYGYDSYDSSHPYYERFKVAHDLRVNLNGS
KSYQVYCFNINSHYPNRKNAFSKQWFKRVDGTGDVFTNYAQTPKIRGESL
NNKLLSIMYNAYPKNANGYMDKIEPLNAILVTQQAVWYYSDSSYGNIKTL
WASELKDGKIDFEQVKLMREAYSKLISDDLEETSKNKLPQGSKLNIFVPQ
DKSVQNLLSAEYVPESPPAPGQSPEPPVQTKKTSVIIRKYAEGDYSKLLE
GATLRLTGEDILDFQEKVFQSNGTGEKIELSNGTYTLTETSSPDGYKIAE
PIKFRVVNKKVFIVQKDGSQVENPNKEVAEPYSVEAYSDMQDSNYINPET
FTPYGKFYYAKNKDKSSQVVYCFNADLHSPPESEDGGGTIDPDISTMKEV
KYTHTAGSDLFKYALRPRDTNPEDFLKHIKKVTEKGYNKKGDSYNGLTET
QFRAATQLAIYYFTDSTDLKTLKTYNNGKGYHGFESMDEKTLAVTKELIN
YAQDNSAPQLTNLDFFVPNNSKYQSLIGTEYHPDDLVDVIRMEDKKQEVI
PVTHSLTVKKTVVGELGDKTKGFQFELELKDKTGQPIVNTLKTNNQDLVA
KDGKYSFNLKHGDTIRIEGLPTGYSYTLKETEAKDYIVTVDNKVSQEAQS
ASENVTADKEVTFENRKDLVPPTGFITDGGTYLWLLLLVPFGLLVWFFGR
KGLKND

[1135] 19224135 contains an amino acid motif indicative of a cell wall anchor: SEQ ID NO: 184 VPPTG (shown in italics in SEQ ID NO: 109, above). In some recombinant host cell systems, it may be preferable to remove this motif to facilitate secretion of a recombinant 19224135 protein from the host cell. Alternatively, in other recombinant host cell systems, it may be preferable to use the cell wall anchor motif to anchor the recombinantly expressed protein to the cell wall. The extracellular domain of the expressed protein may be cleaved during purification or the recombinant protein may be left attached to either inactivated host cells or cell membranes in the final composition.

[1136] A pilin motif, discussed above, containing a conserved lysine (K) residue has also been identified in 19224135. The pilin motif sequence is underlined in SEQ ID NO: 109, below. Conserved lysine (K) residues are also marked in bold, at amino acid residues 164 and 172. The pilin sequence, in particular the conserved lysine residues, are thought to be important for the formation of oligomeric, pilus-like structures. Preferred fragments of 19224135 include at least one conserved lysine residue. Preferably, fragments include the pilin sequence.

SEQ ID NO: 109

MNNKKLQKKQDAPRVSNRKPKQLTVTLVGVFLMELTLVSSMRGAQSIFGE
EKRIEEVSVPKIKSPDDAYPWYGYDSYDSSHPYYERFKVAHDLRVNLNGS
KSYQVYCFNINSHYPNRKNAFSKQWFKRVDGTGDVFTNYAQTPKIRGESL
NNKLLSIMYNAYPKNANGYMDKIEPLNAILVTQQAVWYYSDSSYGNIKTL
WASELKDGKIDFEQVKLMREAYSKLISDDLEETSKNKLPQGSKLNIFVPQ
DKSVQNLLSAEYVPESPPAPGQSPEPPVQTKKTSVIIRKYAEGDYSKLLE
GATLRLTGEDILDFQEKVFQSNGTGEKIELSNGTYTLTETSSPDGYKIAE
PIKFRVVNKKVFIVQKDGSQVENPNKEVAEPYSVEAYSDMQDSNYINPET
FTPYGKFYYAKNKDKSSQVVYCFNADLHSPPESEDGGGTIDPDISTMKEV
KYTHTAGSDLFKYALRPRDTNPEDFLKHIKKVTEKGYNKKGDSYNGLTET
QFRAATQLAIYYFTDSTDLKTLKTYNNGKGYHGFESMDEKTLAVTKELIN
YAQDNSAPQLTNLDFFVPNNSKYQSLIGTEYHPDDLVDVIRMEDKKQEVI
PVTHSLTVKKTVVGELGDKTKGFQFELELKDKTGQPIVNTLKTNNQDLVA
KDGKYSFNLKHGDTIRIEGLPTGYSYTLKETEAKDYIVTVDNKVSQEAQS
ASENVTADKEVTFENRKDLVPPTGFITDGGTYLWLLLLVPFGLLVWFFGR
KGLKND

[1137] An E box containing a conserved glutamic residue has been identified in 19224135. The E-box motif is underlined in SEQ ID NO: 109, below. The conserved glutamic acid (E), at amino acid residue 339, is marked in bold. The E box motif, in particular the conserved glutamic acid residue, is thought to be important for the formation of oligomeric pilus-like structures of 19224135. Preferred fragments of 19224135 include the conserved glutamic acid residue. Preferably, fragments include the E box motif.

SEQ ID NO: 109

MNNKKLQKKQDAPRVSNRKPKQLTVTLVGVFLMELTLVSSMRGAQSIFGE
EKRIEEVSVPKIKSPDDAYPWYGYDSYDSSHPYYERFKVAHDLRVNLNGS
KSYQVYCFNINSHYPNRKNAFSKQWFKRVDGTGDVFTNYAQTPKIRGESL
NNKLLSIMYNAYPKNANGYMDKIEPLNAILVTQQAVWYYSDSSYGNIKTL
WASELKDGKIDFEQVKLMREAYSKLISDDLEETSKNKLPQGSKLNIFVPQ
DKSVQNLLSAEYVPESPPAPGQSPEPPVQTKKTSVIIRKYAEGDYSKLLE
GATLRLTGEDILDFQEKVFQSNGTGEKIELSNGTYTLTETSSPDGYKIAE
PIKFRVVNKKVFIVQKDGSQVENPNKEVAEPYSVEAYSDMQDSNYINPET
FTPYGKFYYAKNKDKSSQVVYCFNADLHSPPESEDGGGTIDPDISTMKEV
KYTHTAGSDLFKYALRPRDTNPEDFLKHIKKVTEKGYNKKGDSYNGLTET
QFRAATQLAIYYFTDSTDLKTLKTYNNGKGYHGFESMDEKTLAVTKELIN
YAQDNSAPQLTNLDFFVPNNSKYQSLIGTEYHPDDLVDVIRMEDKKQEVI
PVTHSLTVKKTVVGELGDKTKGFQFELELKDKTGQPIVNTLKTNNQDLVA
KDGKYSFNLKHGDTIRIEGLPTGYSYTLKETEAKDYIVTVDNKVSQEAQS
ASENVTADKEVTFENRKDLVPPTGFITDGGTYLWLLLLVPFGLLVWFFGR
KGLKND

[1138] 19224136 is thought to be a LepA protein. An example of a nucleotide sequence encoding the LepA protein (SEQ ID NO: 110) and a LepA protein amino acid sequence (SEQ ID NO: 111) are set forth below.

SEQ ID NO: 110
ATGACTAATTACCTAAATCGCTTAAATGAGAATCCACTATTTAAAGCTTT
CATACGGTTAGTACTTAAGATTTCTATTATTGGATTTCTAGGTTACATTC
TATTTCAGTATGTTTTTGGCGTCATGATTGTTAACACAAATCAGATGAGT
CCTGCTGTAAGTGCTGGTGATGGAGTCTTATATTATCGTTTGACTGATCG
CTATCATATTAATGATGTGGTGGTCTATGAGGTTGATAACACTTTGAAAG
TTGGTCGAATTGCCGCTCAAGCTGGCGATGAGGTTAGTTTTACGCAAGAA
GGAGGACTGTTGATTAATGGGCATCCACCAGAAAAAGAGGTCCCTTACCT
GACGTATCCTCACTCAAGTGGTCCAAACTTTCCCTATAAAGTTCCTACGG
GTACGTATTTCATATTGAATGATTATCGTGAAGAACGTTTGGACAGTCGT
TATTATGGGGCGTTACCCATCAATCAAATCAAAGGGAAAATCTCAACTCT
ATTAAGAGTGAGAGGAATTTAA

SEQ ID NO: 111

MTNYLNRLNENPLFKAFIRLVLKISIIGFLGYILFQYVFGVMIVNTNQMS
PAVSAGDGVLYYRLTDRYHINDVVVYEVDNTLKVGRIAAQAGDEVSFTQE
GGLLINGHPPEKEVPYLTYPHSSGPNFPYKVPTGTYFILNDYREERLDSR
YYGALPINQIKGKISTLLRVRGI

[1139] 19224137 is thought to be a fimbrial protein. An example of a nucleotide sequence encoding the fimbrial protein (SEQ ID NO: 112) and a fimbrial protein amino acid sequence (SEQ ID NO: 113) are set forth below.

SEQ ID NO: 112

ATGAAAAAAAATAAATTATTACTTGCTACTGCAATCTTAGCAACTGCTTT
AGGAACAGCTTCTTTAAATCAAAACGTAAAAGCTGAGACGGCAGGGGTTG
TTAGCAGTGGTCAATTAACAATAAAAAAATCAATTACAAATTTTAATGAT
GATACACTTTTGATGCCTAAGACAGACTATACTTTTAGCGTTAATCCGGA
TAGTGCGGCTACAGGTACTGAAAGTAATTTACCAATTAAACCAGGTATTG
CTGTTAACAATCAAGATATTAAGGTTTCTTATTCTAATACTGATAAGACA
TCAGGTAAAGAAAAACAAGTTGTTGTTGACTTTATGAAAGTTACTTTTCC
TAGCGTTGGTATTTACCGTTATGTTGTTACCGAGAATAAAGGGACAGCAG
AAGGAGTTACATATGATGATACAAAATGGTTAGTTGACGTCTATGTTGGT
AATAATGAAAAGGGAGGTCTTGAACCAAAGTATATTGTATCTAAAAAAGG
AGATTCTGCTACTAAAGAACCAATCCAGTTTAATAATTCATTCGAAACAA
CGTCATTAAAAATTGAAAAGGAAGTTACTGGTAATACAGGAGATCATAAA
AAAGCATTTACCTTTACATTAACATTGCAACCAAATGAATACTATGAGGC
AAGTTCGGTTGTGAAAATTGAAGAGAACGGACAAACGAAAGATGTGAAAA
TTGGGGAGGCATATAAGTTTACTTGAACGAATAGTCAGAGTGTGATATTG
TCTAAATTACCAGTTGGTATTAATTATAAAGTTGAAGAAGCAGAAGCTAA
TCAAGGTGGATATACTACAACAGCAACTTTAAAAGATGGAGAAAAGTTAT
CTACTTATAACTTAGGTCAGGAACATAAAACAGACAAGACTGCTGATGAA
ATCGTTGTCACAAATAACCGTGACACTCAAGTTCCAACTGGTGTTGTAGG
CACCCTTGCTCCATTTGCAGTTCTTAGCATTGTGGCTATTGGTGGAGTTA
TCTATATTACAAAACGTAAAAAAGCTTAA

SEQ ID NO: 113

MKKNKLLLATAILATALGTASLNQNVKAETAGVVSSGQLTIKKSITNFND
DTLLMPKTDYTFSVNPDSAATGTESNLPIKPGIAVNNQDIKVSYSNTDKT
SGKEKQVVVDFMKVTFPSVGIYRYVVTENKGTAEGVTYDDTKWLVDVYVG
NNEKGGLEPKYIVSKKGDSATKEPIQFNNSFETTSLKIEKEVTGNTGDHK
KAFTFTLTLQPNEYYEASSVVKIEENGQTKDVKIGEAYKFTLNDSQSVIL
SKLPVGINYKVEEAEANQGGYTTTATLKDGEKLSTYNLGQEHKTDKTADE
IVVTNNRDTQVPTGVVGTLAPFAVLSIVAIGGVIYITKRKKA

[1140] 19224137 contains an amino acid motif indicative of a cell wall anchor: SEQ ID NO: 140 QVPTG (shown in italics in SEQ ID NO: 113, above). In some recombinant host cell systems, it may be preferable to remove this motif to facilitate secretion of a recombinant 19224137 protein from the host cell. Alternatively, in other recombinant host cell systems, it may be preferable to use the cell wall anchor motif to anchor the recombinantly expressed protein to the cell wall. The extracellular domain of the expressed protein may be cleaved during purification or the recombinant protein may be left attached to either inactivated host cells or cell membranes in the final composition.

[1141] A pilin motif, discussed above, containing a conserved lysine (K) residue has also been identified in 19224137. The pilin motif sequence is underlined in SEQ ID NO: 113, below. A conserved lysine (K) residue is also marked in bold, at amino acid residue 160. The pilin sequence, in particular the conserved lysine residues, are thought to be important for the formation of oligomeric, pilus-like structures. Preferred fragments of 19224137 include the conserved lysine residue. Preferably, fragments include the pilin sequence.

SEQ ID NO: 113

MKKNKLLLATAILATALGTASLNQNVKAETAGVVSSGQLTIKKSITNFND
DTLLMPKTDYTFSVNPDSAATGTESNLPIKPGIAVNNQDIKVSYSNTDKT
SGKEKQVVVDFMKVTFPSVGIYRYVVTENKGTAEGVTYDDTKWLVDVYVG
NNEKGGLEPKYIVSKKGDSATKEPIQFNNSFETTSLKIEKEVTGNTGDHK
KAFTFTLTLQPNEYYEASSVVKIEENGQTKDVKIGEAYKFTLNDSQSVIL
SKLPVGINYKVEEAEANQGGYTTTATLKDGEKLSTYNLGQEHKTDKTADE
IVVTNNRDTQVPTGVVGTLAPFAVLSIVAIGGVIYITKRKKA

[1142] An E box containing a conserved glutamic residue has been identified in 19224137. The E-box motif is underlined in SEQ ID NO: 113, below. The conserved glutamic acid (E), at amino acid residue 263, is marked in bold. The E box motif, in particular the conserved glutamic acid residue, is thought to be important for the formation of oligomeric pilus-like structures of 19224137. Preferred fragments of 19224137 include the conserved glutamic acid residue. Preferably, fragments include the E box motif.

SEQ ID NO: 113

MKKNKLLLATAILATALGTASLNQNVKAETAGVVSSGQLTIKKSITNFND
DTLLMPKTDYTFSVNPDSAATGTESNLPIKPGIAVNNQDIKVSYSNTDKT
SGKEKQVVVDFMKVTFPSVGIYRYVVTENKGTAEGVTYDDTKWLVDVYVG
NNEKGGLEPKYIVSKKGDSATKEPIQFNNSFETTSLKIEKEVTGNTGDHK
KAFTFTLTLQPNEYYEASSVVKIEENGQTKDVKIGEAYKFTLNDSQSVIL
SKLPVGINYKVEEAEANQGGYTTTATLKDGEKLSTYNLGQEHKTDKTADE
IVVTNNRDTQVPTGVVGTLAPFAVLSIVAIGGVIYITKRKKA

[1143] 19224138 is thought to be a SrtC2-type sortase. An example of a nucleotide sequence encoding the SrtC2 sortase (SEQ ID NO: 114) and a SrtC2 sortase amino acid sequence (SEQ ID NO: 115) are set forth below.

SEQ ID NO: 114

ATGATGATGACAATTGTACAGGTTATCAATAAAGCCATTGATACTCTCAT
TCTTATCTTTTGTTTAGTCGTACTATTTTTAGCTGGTTTTGGTTTGTGGG
ATTCTTATCATCTCTATCAACAAGCAGACGCTTCTAATTTCAAAAAATTT
AAAACAGCTCAACAACAGCCTAAATTTGAAGACTTGTTAGCTTTGAATGA
GGATGTCATTGGTTGGTTAAATATCCCGGGGACTCATATTGATTATCCTC
TAGTTCAGGGAAAAACGAATTTAGAGTATATTAATAAAGCAGTTGATGGC
AGTGTTGCCATGTCTGGTAGTTTATTTTTAGATACACGGAATCATAATGA
TTTTACGGACGATTACTCTCTGATTTATGGCCATCATATGGCAGGTAATG
CCATGTTTGGCGAAATTCCAAAATTTTTAAAAAAGGATTTTTTCAACAAA
CATAATAAAGCTATCATTGAAACAAAAGAGAGAAAAAAACTAACCGTCAC
TATTTTTGCTTGTCTCAAGACAGATGCCTTTGACCAGTTAGTTTTTAATC
CTAATGCTATTACCAATCAAGACCAACAAAGGCAGCTCGTTGATTATATC
AGTAAAAGATCAAAACAATTTAAACCTGTTAAATTGAAGCATCATACAAA
GTTCGTTGCTTTTTCAACGTGTGAAAATTTTTCTACTGACAATCGTGTTA
TCGTTGTCGGTACTATTCAAGAATAA

SEQ ID NO: 115

MMMTIVQVINKAIDTLILIFCLVVLFLAGFGLWDSYHLYQQADASNFKKF
KTAQQQPKFEDLLALNEDVIGWLNIPGTHIDYPLVQGKTNLEYINKAVDG
SVAMSGSLFLDTRNHNDFTDDYSLIYGHHMAGNAMFGEIPKFLKKDFFNK
HNKAIIETKERKKLTVTIFACLKTDAFDQLVFNPNAITNQDQQRQLVDYI
SKRSKQFKPVKLKHHTKFVAFSTCENFSTDNRVIVVGTIQE

[1144] 19224139 is an open reading frame that encodes a sortase substrate motif LPXAG shown in italics in SEQ ID NO: 117. An example of a nucleotide sequence of the open reading frame (SEQ ID NO: 116) and the amino acid sequence encoded by the open reading frame (SEQ ID NO: 117) are set forth below.

SEQ ID NO: 116

ATGTTATTTTCTGTCGTAATGATATTAACCATGCTGGCCTTTAATCAGAC
TGTTTTAGCAAAAGACAGCACTGTTCAAACTAGCATTAGTGTCGAAAATG
TCTTAGAGAGAGCAGGCGATAGTACCCCATTTTCGATTGCATTAGAATCA
ATTGATGCGATGAAAACAATAGAAGAAATAACAATTGCTGGTTCTGGAAA
AGCAAGCTTTTCCCCTCTGACCTTCACAACAGTTGGGCAATATACTTATC
GTGTTTATCAGAAGCCTTCACAAAATAAAGATTATCAAGCAGATACTACT
GTATTTGACGTTCTTGTCTATGTGACCTATGATGAAGATGGGACTCTAGT
CGCAAAAGTTATTTCTCGAAGGGCTGGAGACGAAGAAAAATCAGCGATTA
CTTTTAAGCCCAAACGGTTAGTAAAACCAATACCGCCTAGACAACCTAAC
ATCCCTAAAACCCCATTACCATTAGCTGGTGAAGTAAAAAGTTTATTGGG
TATCTTAAGTATCGTATTACTGGGGTTACTAGTTCTTCTTTATGTTAAAA
AACTGAAGAG

SEQ ID NO: 117

MLFSVVMILTMLAFNQTVLAKDSTVQTSISVENVLERAGDSTPFSIALES
IDAMKTIEEITIAGSGKASFSPLTFTTVGQYTYRVYQKPSQNKDYQADTT
VFDVLVYVTYDEDGTLVAKVISRRAGDEEKSAITFKPKRLVKPIPPRQPN
IPKTPLPLAGEVKSLLGILSIVLLGLLVLLYVKKLKSKL

[1145] 19224139 contains an amino acid motif indicative of a cell wall anchor: SEQ ID NO: 185 LPLAG (shown in italics in SEQ ID NO: 117, above). In some recombinant host cell systems, it may be preferable to remove this motif to facilitate secretion of a recombinant 19224139 protein from the host cell. Alternatively, in other recombinant host cell systems, it may be preferable to use the cell wall anchor motif to anchor the recombinantly expressed protein to the cell wall. The extracellular domain of the expressed protein may be cleaved during purification or the recombinant protein may be left attached to either inactivated host cells or cell membranes in the final composition.

[1146] A pilin motif, discussed above, containing a conserved lysine (K) residue has also been identified in 19224139. The pilin motif sequence is underlined in SEQ ID NO: 117, below. A conserved lysine (K) residue is also marked in bold, at amino acid residue 138. The pilin sequence, in particular the conserved lysine residue, is thought to be important for the formation of oligomeric, pilus-like structures. Preferred fragments of 19224139 include the conserved lysine residue. Preferably, fragments include the pilin sequence.

SEQ ID NO: 117

MLFSVVMILTMLAFNQTVLAKDSTVQTSISVENVLERAGDSTPFSIALES
IDAMKTIEEITIAGSGKASFSPLTFTTVGQYTYRVYQKPSQNKDYQADTT
VFDVLVYVTYDEDGTLVAKVISRRAGDEEKSAITFKPKRLVKPIPPRQPN
IPKTPLPLAGEVKSLLGILSIVLLGLLVLLYVKKLKSKL

[1147] Two E boxes containing conserved glutamic residues have been identified in 19224139. The E-box motifs are underlined in SEQ ID NO: 117, below. The conserved glutamic acid (E) residues, at amino acid residues 58 and 128, are marked in bold. The E box motifs, in particular the conserved glutamic acid residues, are thought to be important for the formation of oligomeric pilus-like structures of 19224139. Preferred fragments of 19224139 include at least one conserved glutamic acid residue. Preferably, fragments include at least one E box motif.

SEQ ID NO: 117

MLFSVVMILTMLAFNQTVLAKDSTVQTSISVENVLERAGDSTPFSIALES
IDAMKTIEEITIAGSGKASFSPLTFTTVGQYTYRVYQKPSQNKDYQADTT
VFDVLVYVTYDEDGTLVAKVISRRAGDEEKSAITFKPKRLVKPIPPRQPN
IPKTPLPLAGEVKSLLGILSIVLLGLLVLLYVKKLKSKL

[1148] 19224140 is thought to be a MsmRL protein. An example of a nucleotide sequence encoding the MsmRL protein (SEQ ID NO: 118) and a MsmRL protein amino acid sequence (SEQ ID NO: 119) are set forth below.

SEQ ID NO: 118

ATGGTTATATTCGATTTAAAACATGTGCAAACATTACACAGCTTGTCTCA
ATTACCTATTTCAGTGATGTCACAAGATAAGGCACTTATTCAAGTATATG
GTAATGACGACTATTTATTATGTTACTATCAATTTTTAAAGCATCTAGCT
ATTCCTCAAGCTGCACAAGATGTTATTTTTTATGAGGGTTTATTTGAAGA
GTCCTTTATGATTTTTCCTCTTTGTCACTACATTATTGCCATTGGACCTT
TCTACCCTTATTCACTTAATAAAGACTATCAGGAACAATTAGCTAATAAT
TTTTTAAAACATTCTTCTCATCGTAGCAAAGAAGAGCTCTTATCCTATAT
GGCACTTGTCCCACATTTTCCAATTAATAATGTGCGGAACCTTTTGATAG
CTATTGACGCTTTTTTTGACACACAATTTGAGACGACTTGCCAACAAACA
ATTCATCAATTGTTGCAGCATTCAAAACAGATGACTGCTGATCCTGATAT
CATTCATCGCCTTAAGCATATTAGCAAAGCATCTAGCCAACTACCGCCTG
TTTTAGAGCACCTAAATCATATTATGGATCTGGTAAAGCTAGGCAATCCA
CAATTGCTCAAGCAAGAAATCAATCGCATCCCCTTATCAAGTATCACCTC
ATCTTCTATTTCTGCTCTAAGGGCGGAAAAGAACCTCACTGTTATCTATT
TAACTAGGTTACTGGAATTCAGTTTTGTAGAAAATACTGACGTAGCAAAG
CATTATAGCCTTGTCAAATACTACATGGCCTTAAATGAAGAAGCGAGTGA
CTTGCTCAAAGTTTTGAGAATTCGCTGTGCAGCCATCATCCATTTTTCCG
AATCATTAACCAATAAAAGTATTTCTGATAAACGTCAAATGTACAATAGT
GTGCTTCATTATGTCGATAGTCACCTGTATTCCAAATTAAAGGTATCTGA
TATCGCTAAGCGCCTATATGTTTCCGAATCTCACTTACGTTCAGTCTTTA
AAAAATACTCAAATGTTTCCTTACAACATTATATTCTAAGTACAAAAATC
AAAGAAGCTCAACTACTCTTAAAACGAGGAATTCCTGTTGGAGAAGTGGC
TAAAAGCTTATATTTTTATGACACTACCCATTTTCATAAAATCTTTAAAA
AATACACGGGTATTTCTTCAAAAGACTATCTTGCTAAATACCGAGATAAT
ATTTAA

SEQ ID NO: 119

MVIFDLKHVQTLHSLSQLPISVMSQDKALIQVYGNDDYLLCYYQFLKHLA
TPQAAQDVIFYEGLFEESFMIFPLCHYIIAIGPFYPYSLNKDYQEQLANN
FLKHSSHRSKEELLSYMALVPHFPINNVRNLLIAIDAFFDTQFETTCQQT
IHQLLQHSKQMTADPDIIHRLKHISKASSQLPPVLEHLNHIMDLVKLGNP
QLLKQEINRIPLSSITSSSISALRAEKNLTVIYLTRLLEFSFVENTDVAK
HYSLVKYYMALNEEASDLLKVLRIRCAAIIHFSESLTNKSISDKRQMYNS
VLHYVDSHLYSKLKVSDIAKRLYVSESHLRSVFKKYSNVSLQHYILSTKI
KEAQLLLKRGIPVGEVAKSLYFYDTTHFHKIFKKYTGISSKDYLAKYRDN
I

[1149] 19224141 is thought to be a protein F2 fibronectin binding protein. An example of a nucleotide sequence encoding the protein F2 fibronectin binding protein (SEQ ID NO: 120) and a protein F2 fibronectin binding protein amino acid sequence (SEQ ID NO: 121) are set forth below.

SEQ ID NO: 120

ATGACACAAAAAAATAGCTATAAGTTAAGCTTCCTGTTATCCCTAACAGG
ATTTATTTTAGGTTTATTATTGGTTTTTATAGGATTGTCCGGAGTATCAG
TAGGACATGCGGAAACAAGAAATGGAGCAAACAAACAAGGATCTTTTGAA
ATCAAGAAAGTCGAGCAAAAGAATAAGGCTTTACCGGGAGCAAGTTTTTC
AGTGACATCAAAGGATGGCAAGGGAACATGTGTTCAAAGGTTGACTTGAA
ATGATAAAGGTATTGTAGATGGTCAAAATCTCGAACCAGGGACTTATAGC
TTAAAAGAAGAAACAGCACCAGATGGTTATGATAAAACCAGCCGGAGTTG
GACAGTGACTGTTTATGAGAACGGCTATAGCAAGTTGGTTGAAAATCCCT
ATAATGGGGAAATCATCAGTAAAGCAGGGTCAAAAGATGTTAGTAGTTCT
TTACAGTTGGAAAATCCGAAAATGTCAGTTGTTTCTAAATATGGGAAAAC
AGAGGTTAGTAGTGGCGCAGCGGATTTCTAGCGGAAGGATGCCGCCTATT
TTAAAATGTGTTTTGAGTTGAAACAAAAGGATAAATCTGAAACAATCAAC
CCAGGTGATACCTTTGTGTTACAGCTGGATAGACGTCTGAATCCTAAAGG
TATCAGTCAAGATATCCCTAAAATCATTTACGACAGTGGAAATAGTCGGG
TTGCGATTGGAAAATACCATGGTGAGAACCATCAACTTATCTATACTTTC
ACAGATTATATTGCGGGTTTAGATAAAGTCCAGTTGTCTGCAGAATTGAG
CTTATTCCTAGAGAATAAGGAAGTGTTGGAAAATACTAGTATGTCAAATT
TTAAGAGTAGCATAGGTGGGCAGGAGATCAGCTATAAAGGAACGGTTAAT
GTTCTTTATGGAAATGAGAGCACTAAAGAAAGCAATTATATTAGTAATGG
ATTGAGGAATGTGGGTGGGAGTATTGAAAGCTACAACACCGAAACGGGAG
AATTTGTCTGGTATGTTTATGTCAATCCAAACCGTACCAATATTCCTTAT
GCGACGATGAATTTATGGGGATTTGGAAGGGCTCGTTCAAATACAAGCGA
CTTAGAAAACGACGCTAATACAAGTAGTGCTGAGCTTGGAGAGATTCAGG
TCTATGAAGTACCTGAAGGAGAAAAATTACCATCAAGTTATGGGGTTGAT
GTTAGAAAAGTTACTTTAAGAACGGATATCACAGCAGGCCTAGGAAATGG
TTTTCAAATGAGCAAACGTCAGCGAATTGACTTTGGAAATAATATCCAAA
ATAAAGCATTTATCATCAAAGTAACAGGGAAAACAGACCAATCTGGTAAG
CCATTGGTTGTTCAATCCAATTTGGCAAGTTTTCGTGGTGCTTCTGAATA
TGCTGCTTTTACTCCAGTTGGAGGAAATGTCTACTTCCAAAACGAAATTG
CCTTGTCTCCTTCTAAGGGTAGTGGTTCTGGGAAAAGTGAATTTACTAAG
CCCTCTATTACAGTAGCAAATCTAAAACGAGTGGCTCAGCTTCGCTTTAA
GAAAATGTCAACTGAGAATGTGCCATTGCCAGAAGCGGCTTTTGAGCTGC
GTTCATCAAATGGTAATAGTCAGAAATTAGAAGCCAGTTCAAACACACAA
GGAGAGGTTCACTTTAAGGACCTGACCTCGGGCACATATGACCTGTATGA
AACAAAAGCGCCAAAAGGTTATCAGCAGGTGACAGAGAAATTGGCGACCG
TTACTGTTGATACTACCAAACCTGCTGAGGAAATGGTCACTTGGGGAAGC
CCACATTCGTCTGTAAAAGTAGAAGCTAACAAAGAAGTCACGATTGTCAA
CCATAAAGAAACCCTTACGTTTTCAGGGAAGAAAATTTGGGAGAATGACA
GACCAGATCAACGCCCAGCAAAGATTCAAGTGCAACTGTTGCAAAATGGT
CAAAAGATGCCTAACCAGATTCAAGAAGTAACGAAGGATAACGATTGGTC
TTATCACTTCAAAGACTTGCCTAAGTACGATGCCAAGAATCAGGAGTATA
AGTACTCAGTTGAAGAAGTAAATGTTCCAGACGGCTACAAGGTGTCGTAT
TTAGGAAATGATATATTTAACACCAGAGAAACAGAATTTGTGTTTGAACA
GAATAACTTTAACCTTGAATTTGGAAATGCTGAAATAAAAGGTCAATCTG
GGTCAAAAATCATTGATGAAGACACGCTAACGTCTTTCAAAGGTAAGAAA
ATTTGGAAAAATGATACGGCAGAAAATCGTCCCCAAGCCATTCAAGTGCA
GCTTTATGCTGATGGAGTGGCTGTGGAAGGTCAAACCAAATTTATTTCTG
GCTCAGGTAATGAGTGGTCATTTGAGTTTAAAAACTTGAAGAAGTATAAT
GGAACAGGTAATGACATCATTTACTCAGTTAAAGAAGTAACTGTTCCAAC
AGGTTATGATGTGACTTACTCAGCTAATGATATTATTAATACCAAACGTG
AGGTTATTACACAACAAGGACCGAAACTAGAGATTGAAGAAACGCTTCCG
CTAGAATCAGGTGCTTCAGGCGGTACCACTACTGTCGAAGACTCACGCCC
AGTTGATACCTTATCAGGTTTATCAAGTGAGCAAGGTCAGTCCGGTGATA
TGACAATTGAAGAAGATAGTGCTACCCATATTAAATTCTCAAAACGTGAT
ATTGACGGCAAAGAGTTAGCTGGTGCAACTATGGAGTTGCGTGATTCATC
TGGTAAAACTATTAGTACATGGATTTCAGATGGACAAGTGAAAGATTTCT
ACCTGATGCCAGGAAAATATACATTTGTCGAAACCGCAGCACCAGACGGT
TATGAGATAGCAACTGCTATTACCTTTACAGTTAATGAGCAAGGTCAGGT
TACTGTAAATGGCAAAGCAACTAAAGGTGACACTCATATTGTCATGGTTG
ATGCTTACAAGCCAACTAAGGGTTCAGGTCAGGTTATTGATATTGAAGAA
AAGCTTCCAGACGAGCAAGGTCATTCTGGTTCAACTACTGAAATAGAAGA
CAGTAAATCTTCAGACCTTATCATTGGCGGTCAAGGTGAAGTTGTTGACA
CAACAGAAGACACACAAAGTGGTATGACGGGCCATTCTGGCTCAACTACT
GAAATAGAAGATAGCAAGTCTTCAGACCTTATCATTGGTGGTCAGGGGCA
GGTTGTCGAGACAACAGAGGATACCCAAACTGGCATGTACGGGGATTCTG
GTTGTAAAACGGAAGTCGAAGATACTAAACTAGTACAATCCTTCCACTTT
GATAACAAGGAACCAGAAAGTAACTCTGAGATTCCTAAAAAAGATAAGCC
AAAGAGTAATAGTAGTTTACCAGCAACTGGTGAGAAGCAACATAATATGT
TCTTTTGGATGGTTACTTCTTGCTCACTTATTAGTAGTGTTTTTGTAATA
TCACTAAAATCCAAAAAACGCCTATCATCATGTTAA

SEQ ID NO: 121

MTQKNSYKLSFLLSLTGFILGLLLVFIGLSGVSVGHAETRNGANKQGSFE
IKKVDQNNKPLPGATFSLTSKDGKGTSVQTFTSNDKGIVDAQNLQPGTYT
LKEETAPDGYDKTSRTWTVTVYENGYTKLVENPYNGEIISKAGSKDVSSS
LQLENPKMSVVSKYGKTEVSSGAADFYRNHAAYFKMSFELKQKDKSETIN
PGDTFVLQLDRRLNPKGISQDIPKIIYDSANSPLAIGKYHAENHQLIYTF
TDYIAGLDKVQLSAELSLFLENKEVLENTSISNFKSTIGGQEITYKGTVN
VLYGNESTKESNYITNGLSNVGGSIESYNTETGEFVWYVYVNPNRTNTPY
ATMNLWGFGRARSNTSDLENDANTSSAELGEIQVYEVPEGEKLPSSYGVD
VTKLTLRTDITAGLGNGFQMTKRQRIDFGNNIQNKAFIIKVTGKTDQSGK
PLVVQSNLASERGASEYAAFTPVGGNVYFQNEIALSPSKGSGSGKSEFTK
PSITVANLKRVAQLRFKKMSTDNVPLPEAAFELRSSNGNSQKLEASSNTQ
GEVHFKDLTSGTYDLYETKAPKGYQQVTEKLATVTVDTTKPAEEMVTWGS
PHSSVKVEANKEVTIVNHKETLTFSGKKIWENDRPDQRPAKIQVQLLQNG
QKMPNQIQEVTKDNDWSYHFKDLPKYDAKNQEYKYSVEEVNVPDGYKVSY
LGNDIFNTRETEFVFEQNNFNLEFGNAETKGQSGSKIIDEDTLTSFKGKK
IWKNDTAENRPQAIQVQLYADGVAVEGQTKFISGSGNEWSFEFKNLKKYN
GTGNDTIYSVKEVTVPTGYDVTYSANDIINTKREVITQQGPKLEIEETLP
LESGASGGTTTVEDSRPVDTLSGLSSEQGQSGDMTIEEDSATHIKFSKRD
IDGKELAGATMELRDSSGKTISTWISDGQVKDFYLMPGKYTFVETAAPDG
YEIATAITFTVNEQGQVTVNGKATKGDTHTVMVDAYKPTKGSGQVIDIEE
KLPDEQGHSGSTTEIEDSKSSDLIIGGQGEVVDTTEDTQSGMTGHSGSTT
EIEDSKSSDVIIGGQGQVVETTEDTQTGMYGDSGCKTEVEDTKLVQSFHF
DNKEPESNSEIPKKDKPKSNTSLPATGEKQHNMFFWMVTSCSLISSVFVI
SLKSKKRLSSC

[1150] 19224141 contains an amino acid motif indicative of a cell wall anchor: SEQ ID NO: 181 LPATG (shown in italics in SEQ ID NO: 121, above). In some recombinant host cell systems, it may be preferable to remove this motif to facilitate secretion of a recombinant 19224141 protein from the host cell. Alternatively, in other recombinant host cell systems, it may be preferable to use the cell wall anchor motif to anchor the recombinantly expressed protein to the cell wall. The extracellular domain of the expressed protein may be cleaved during purification or the recombinant protein may be left attached to either inactivated host cells or cell membranes in the final composition.

[1151] Two pilin motifs, discussed above, containing conserved lysine (K) residues have also been identified in 19224141. The pilin motif sequences are underlined in SEQ ID NO: 121, below. Conserved lysine (K) residues are also marked in bold, at amino acid residues 157 and 163 and at amino acid residues 216, 224, and 238. The pilin sequence, in particular the conserved lysine residues, are thought to be important for the formation of oligomeric, pilus-like structures. Preferred fragments of 19224141 include at least one conserved lysine residue. Preferably, fragments include at least one pilin sequence.

SEQ ID NO: 121

MTQKNSYKLSFLLSLTGFILGLLLVFIGLSGVSVGHAETRNGANKQGSFE
IKKVDQNNKPLPGATFSLTSKDGKGTSVQTFTSNDKGIVDAQNLQPGTYT
LKEETAPDGYDKTSRTWTVTVYENGYTKLVENPYNGEIISKAGSKDVSSS
LQLENPKMSVVSKYGKTEVSSGAADFYRNHAAYFKMSFELKQKDKSETIN
PGDTFVLQLDRRLNPKGISQDIPKIIYDSANSPLAIGKYHAENHQLIYTF
TDYIAGLDKVQLSAELSLFLENKEVLENTSISNFKSTIGGQEITYKGTVN
VLYGNESTKESNYITNGLSNVGGSIESYNTETGEFVWYVYVNPNRTNTPY
ATMNLWGFGRARSNTSDLENDANTSSAELGEIQVYEVPEGEKLPSSYGVD
VTKLTLRTDITAGLGNGFQMTKRQRIDFGNNIQNKAFIIKVTGKTDQSGK
PLVVQSNLASERGASEYAAFTPVGGNVYFQNEIALSPSKGSGSGKSEFTK
PSITVANLKRVAQLRFKKMSTDNVPLPEAAFELRSSNGNSQKLEASSNTQ
GEVHFKDLTSGTYDLYETKAPKGYQQVTEKLATVTVDTTKPAEEMVTWGS
PHSSVKVEANKEVTIVNHKETLTFSGKKIWENDRPDQRPAKIQVQLLQNG
QKMPNQIQEVTKDNDWSYHFKDLPKYDAKNQEYKYSVEEVNVPDGYKVSY
LGNDIFNTRETEFVFEQNNFNLEFGNAETKGQSGSKIIDEDTLTSFKGKK
IWKNDTAENRPQAIQVQLYADGVAVEGQTKFISGSGNEWSFEFKNLKKYN
GTGNDTIYSVKEVTVPTGYDVTYSANDIINTKREVITQQGPKLEIEETLP
LESGASGGTTTVEDSRPVDTLSGLSSEQGQSGDMTIEEDSATHIKFSKRD
IDGKELAGATMELRDSSGKTISTWISDGQVKDFYLMPGKYTFVETAAPDG
YEIATAITFTVNEQGQVTVNGKATKGDTHTVMVDAYKPTKGSGQVIDIEE
KLPDEQGHSGSTTEIEDSKSSDLIIGGQGEVVDTTEDTQSGMTGHSGSTT
EIEDSKSSDVIIGGQGQVVETTEDTQTGMYGDSGCKTEVEDTKLVQSFHF
DNKEPESNSEIPKKDKPKSNTSLPATGEKQHNMFFWMVTSCSLISSVFVI
SLKSKKRLSSC

[1152] Two E boxes containing conserved glutamic residues have been identified in 19224141. The E-box motifs are underlined in SEQ ID NO: 121, below. The conserved glutamic acid (E) residues, at amino acid residues 567 and 944, are marked in bold. The E box motifs, in particular the conserved glutamic acid residues, are thought to be important for the formation of oligomeric pilus-like structures of 19224141. Preferred fragments of 19224141 include at least one conserved glutamic acid residue. Preferably, fragments include at least one E box motif.

SEQ ID NO: 121

MTQKNSYKLSFLLSLTGFILGLLLVFIGLSGVSVGHAETRNGANKQGSFE
IKKVDQNNKPLPGATFSLTSKDGKGTSVQTFTSNDKGIVDAQNLQPGTYT
LKEETAPDGYDKTSRTWTVTVYENGYTKLVENPYNGEIISKAGSKDVSSS
LQLENPKMSVVSKYGKTEVSSGAADFYRNHAAYFKMSFELKQKDKSETIN
PGDTFVLQLDRRLNPKGISQDIPKIIYDSANSPLAIGKYHAENHQLIYTF
TDYIAGLDKVQLSAELSLFLENKEVLENTSISNFKSTIGGQEITYKGTVN
VLYGNESTKESNYITNGLSNVGGSIESYNTETGEFVWYVYVNPNRTNTPY
ATMNLWGFGRARSNTSDLENDANTSSAELGEIQVYEVPEGEKLPSSYGVD
VTKLTLRTDITAGLGNGFQMTKRQRIDFGNNIQNKAFIIKVTGKTDQSGK
PLVVQSNLASERGASEYAAFTPVGGNVYFQNEIALSPSKGSGSGKSEFTK
PSITVANLKRVAQLRFKKMSTDNVPLPEAAFELRSSNGNSQKLEASSNTQ
GEVHFKDLTSGTYDLYETKAPKGYQQVTEKLATVTVDTTKPAEEMVTWGS
PHSSVKVEANKEVTIVNHKETLTFSGKKIWENDRPDQRPAKIQVQLLQNG
QKMPNQIQEVTKDNDWSYHFKDLPKYDAKNQEYKYSVEEVNVPDGYKVSY
LGNDIFNTRETEFVFEQNNFNLEFGNAETKGQSGSKIIDEDTLTSFKGKK
IWKNDTAENRPQAIQVQLYADGVAVEGQTKFISGSGNEWSFEFKNLKKYN
GTGNDTIYSVKEVTVPTGYDVTYSANDIINTKREVITQQGPKLEIEETLP
LESGASGGTTTVEDSRPVDTLSGLSSEQGQSGDMTIEEDSATHIKFSKRD
IDGKELAGATMELRDSSGKTISTWISDGQVKDFYLMPGKYTFVETAAPDG
YEIATAITFTVNEQGQVTVNGKATKGDTHTVMVDAYKPTKGSGQVIDIEE
KLPDEQGHSGSTTEIEDSKSSDLIIGGQGEVVDTTEDTQSGMTGHSGSTT
EIEDSKSSDVIIGGQGQVVETTEDTQTGMYGDSGCKTEVEDTKLVQSFHF
DNKEPESNSEIPKKDKPKSNTSLPATGEKQHNMFFWMVTSCSLISSVFVI
SLKSKKRLSSC

[1153] As discussed above, applicants have also determined the nucleotide and encoded amino acid sequence of fimbrial structural subunits in several other GAS AI-4 strains of bacteria. Examples of sequences of these fimbrial structural subunits are set forth below.

[1154] M12 strain isolate 20010296 is a GAS AI-4 strain of bacteria. 20010296_fimbrial is thought to be a fimbrial structural subunit of M12 strain isolate 20010296. An example of a nucleotide sequence encoding the 20010296_fimbrial protein (SEQ ID NO: 257) and a 20010296_fimbrial protein amino acid sequence (SEQ ID NO: 258) are set forth below.

SEQ ID NO: 257

agcagtggtcaattaacaataaaaaaatcaattacaaattttaatgatga
tacacttttgatgcctaagacagactatacttttagcgttaatccggata
gtgcggctacaggtactgaaagtaatttaccaattaaaccaggtattgct
gttaacaatcaagatattaaggtttcttattctaatactgataagacatc
aggtaaagaaaaacaagttgttgttgactttatgaaagttacttttccta
gcgttggtatttaccgttatgttgttaccgagaataaagggacagcagaa
ggagttacatatgatgatacaaaatggttagttgacgtctatgttggtaa
taatgaaaagggaggtcttgaaccaaagtatattgtatctaaaaaaggag
attctgctactaaagaaccaatccagtttaataattcattcgaaacaacg
tcattaaaaattgaaaaggaagttactggtaatacaggagatcataaaaa
agcatttaactttacattaacattgcaaccaaatgaatactatgaggcaa
gttcggttgtgaaaattgaagagaacggacaaacgaaagatgtgaaaatt
ggggaggcatataagtttactttgaacgatagtcagagtgtgatattgtc
taaattaccagttggtattaattataaagttgaagaagcagaagctaatc
aaggtggatatactacaacagcaactttaaaagatggagaaaagttatct
acttataacttaggtcaggaacataaaacagacaagactgctgatgaaat
cgt

SEQ ID NO: 258

SSGQLTIKKSITNFNDDTLLMPKTDYTFSVNPDSAATGTESNLPIKPGIA
VNNQDIKVSYSNTDKTSGKEKQVVVDFMKVTFPSVGIYRYVVTENKGTAE
GVTYDDTKWLVDVYVGNNEKGGLEPKYIVSKKGDSATKEPIQFNNSFETT
SLKIEKEVTGNTGDHKKAFNFTLTLQPNEYYEASSVVKIEENGQTKDVKI
GEAYKFTLNDSQSVILSKLPVGINYKVEEAEANQGGYTTTATLKDGEKLS
TYNLGQEHKTDKTADEIV

[1155] M12 strain isolate 20020069 is a GAS AI-4 strain of bacteria. 20020069_fimbrial is thought to be a fimbrial structural subunit of M12 strain isolate 20020069. An example of a nucleotide sequence encoding the 20020069_fimbrial protein (SEQ ID NO: 259) and a 20020069_fimbrial protein amino acid sequence (SEQ ID NO: 260) are set forth below.

SEQ ID NO: 259

agcagtggtcaattaacaataaaaaaatcaattacaaattttaatgatga
tacacttttgatgcctaagacagactatacttttagcgttaatccggata
gtgcggctacaggtactgaaagtaatttaccaattaaaccaggtattgct
gttaacaatcaagatattaaggtttcttattctaatactgataagacatc
aggtaaagaaaaacaagttgttgttgactttatgaaagttacttttccta
gcgttggtatttaccgttatgttgttaccgagaataaagggacagcagaa
ggagttacatatgatgatacaaaatggttagttgacgtctatgttggtaa
taatgaaaagggaggtcttgaaccaaagtatattgtatctaaaaaaggag
attctgctactaaagaaccaatccagtttaataattcattcgaaacaacg
tcattaaaaattgaaaaggaagttactggtaatacaggagatcataaaaa
agcatttaactttacattaacattgcaaccaaatgaatactatgaggcaa
gttcggttgtgaaaattgaagagaacggacaaacgaaagatgtgaaaatt
ggggaggcatataagtttactttgaacgatagtcagagtgtgatattgtc
taaattaccagttggtattaattataaagttgaagaagcagaagctaatc
aaggtggatatactacaacagcaactttaaaagatggagaaaagttatct
acttataacttaggtcaggaacataaaacagacaagactgctgatgaaat
cgt

SEQ ID NO: 260

SSGQLTIKKSITNFNDDTLLMPKTDYTFSVNPDSAATGTESNLPIKPGIA
VNNQDIKVSYSNTDKTSGKEKQVVVDEMKVTFPSVGIYRYVVTENKGTAE
GVTYDDTKWLVDVYVGNNEKGGLEPKYIVSKKGDSATKEPIQFNNSEETT
SLKIEKEVTGNTGDHKKAFNFTLTLQPNEYYEASSVVKIEENGQTKDVKI
GEAYKFTLNDSQSVILSKLPVGINYKVEEAEANQGGYTTTATLKDGEKLS
TYNLGQEHKTDKTADEIV

[1156] M12 strain isolate CDC SS 635 is a GAS AI-4 strain of bacteria. CDC SS 635_fimbrial is thought to be a fimbrial structural subunit of M12 strain isolate CDC SS 635. An example of a nucleotide sequence encoding the CDC SS 635_fimbrial protein (SEQ ID NO: 261) and a CDC SS 635_fimbrial protein amino acid sequence (SEQ ID NO: 262) are set forth below.

SEQ ID NO: 261

gagacggcaggggttgttagcagtggtcaattaacaataaaaaaatcaat
tacaaattttaatgatgatacacttttgatgcctaagacagactatactt
ttagcgttaatccggatagtgcggctacaggtactgaaagtaatttacca
attaaaccaggtattgctgttaacaatcaagatattaaggtttcttattc
taatactgataagacatcaggtaaagaaaaacaagttgttgttgacttta
tgaaagttacttttcctagcgttggtatttaccgttatgttgttaccgag
aataaagggacagcagaaggagttacatatgatgatacaaaatggttagt
tgacgtctatgttggtaataatgaaaagggaggtcttgaaccaaagtata
ttgtatctaaaaaaggagattctgctactaaagaaccaatccagtttaat
aattcattcgaaacaacgtcattaaaaattgaaaaggaagttactggtaa
tacaggagatcataaaaaagcatttaactttacattaacattgcaaccaa
atgaatactatgaggcaagttcggttgtgaaaattgaagagaacggacaa
acgaaagatgtgaaaattggggaggcatataagtttactttgaacgatag
tcagagtgtgatattgtctaaattaccagttggtattaattataaagttg
aagaagcagaagctaatcaaggtggatatactacaacagcaactttaaaa
gatggagaaaagttatctacttataacttaggtcaggaacataaaacaga
caagactgctgatgaaatcgttgtcacaaataaccgtgacact

SEQ ID NO: 262

ETAGVVSSGQLTTKKSITNFNDDTLLMPKTDYTFSVNPDSAATGTESNLP
IKPGIAVNNQDIKVSYSNTDKTSGKEKQVVVDPMKVTFPSVGIYRYVVTE
NKGTAEGVTYDDTKWLVDVYVGNNEKGGLEPKYIVSKKGDSATKEPIQFN
NSFETTSLKIEKEVTGNTGDHKKAFNFTLTLQPNEYYEASSVVKIEENGQ
TKDVKIGEAYKFTLNDSQSVILSKLPVGINYKVEEAEANQGGYTTTATLK
DGEKLSTYNLGQEHKTDKTADEIVVTNNRDT

[1157] M5 strain isolate ISS 4883 is a GAS AI-4 strain of bacteria. ISS4883_fimbrial is thought to be a fimbrial structural subunit of M5 strain isolate ISS 4883. An example of a nucleotide sequence encoding the ISS4883_fimbrial protein (SEQ ID NO: 265) and an ISS4883_fimbrial protein amino acid sequence (SEQ ID NO: 266) are set forth below.

SEQ ID NO: 265

gagacggcaggggttgtaacaggaaaatcactacaagttacaaagacaat
gacttatgatgatgaagaggtgttaatgcccgaaaccgcctttactttta
ctatagagcctgatatgactgcaagtggaaaagaaggcgacctagatatt
aaaaatggaattgtagaaggcttagacaaacaagtaacagtaaaatataa
gaatacagataaaacatctcaaaaaactaaaatagcacaatttgattttt
ctaaggttaaatttccagctataggtgtttaccgctatatggtttcagag
aaaaacgataaaaaagacggaattaggtacgatgataaaaagtggactgt
agatgtttatgttgggaataaggccaataacgaagaaggtttcgaagttc
tatatattgtatcaaaagaaggtacttctagtactaaaaaaccaattgaa
tttacaaactctattaaaactacttccttaaaaattgaaaaacaaataac
tggcaatgcaggagatcgtaaaaaatcattcaacttcacattaacattac
aaccaagtgaatattataaaaccggatcagttgtgaaaatcgaacaggat
ggaagtaaaaaagatgtgacgataggaacgccttacaaatttactttggg
acacggtaagagtgtcatgttatcgaaattaccaattggtatcaattact
atcttagtgaagacgaagcgaataaagacggttacactacaacggcaaca
ttaaaagaacaaggcaaagaaaagagttccgatttcactttgagtactca
aaaccagaaaacagacgaatctgctgacgaaatcgttgtcacaaataagc
gtgacactctcgag

SEQ ID NO: 266

ETAGVVTGKSLQVTKTMTYDDEEVLMPETAFTFTIEPDMTASGKEGDLDI
KNGIVEGLDKQVTVKYKNTDKTSQKTKIAQFDFSKVKFPAIGVYRYMVSE
KNDKKDGIRYDDKKWTVDVYVGNKANNEEGFEVLYIVSKEGTSSTKKPIE
FTNSIKTTSLKIEKQITGNAGDRKKSFNFTLTLQPSEYYKTGSVVKIEQD
GSKKDVTIGTPYKFTLGHGKSVMLSKLPIGINYYLSEDEANKDGYTTTAT
LKEQGKEKSSDFTLSTQNQKTDESADEIVVTNKRDTLE

[1158] M50 strain isolate ISS4538 is a GAS AI-4 strain of bacteria. ISS4538_fimbrial is thought to be a fimbrial structural subunit of M50 strain ISS 4538. An example of a nucleotide sequence encoding the ISS4538_fimbrial protein (SEQ ID NO: 255) and an ISS4538_fimbrial protein amino acid sequence (SEQ ID NO: 256) are set forth below.

SEQ ID NO: 255

atgaaaaaaaataaattattacttgctactgcaatcttagcaactgcttt
aggaacagcttctttaaatcaaaacgtaaaagctgagacggcaggggttg
ttagcagtggtcaattaacaataaaaaaatcaattacaaattttaatgat
gatacacttttgatgcctaagacagactatacttttagcgttaatccgga
tagtgcggctacaggtactgaaagtaatttaccaattaaaccaggtattg
ctgttaacaatcaagatattaaggtttcttattctaatactgataagaca
tcaggtaaagaaaaacaagttgttgttgactttatgaaagttacttttcc
tagcgttggtatttaccgttatgttgttaccgagaataaagggacagcag
aaggagttacatatgatgatacaaaatggttagttgacgtctatgttggt
aataatgaaaagggaggtcttgaaccaaagtatattgtatctaaaaaagg
agattctgctactaaagaaccaatccagtttaataattcattcgaaacaa
cgtcattaaaaattgaaaagaaagttactggtaatacaggagatcataaa
aaagcatttaactttacattaacattgcaaccaaatgaatactatgaggc
aagttcggttgtgaaaattgaagagaacggacaaacgaaagatgtgaaaa
ttggggaggcatataagtttactttgaacgatagtcagagtgtgatattg
tctaaattaccagttggtattaattataaagttgaagaagcagaagctaa
tcaaggtggatatactacaacagcaactttaaaagatggagaaaagttat
ctacttataacttaggtcaggaacataaaacagacaagactgctgatgaa
atcgttgtcacaaataancgngacactcnagttccaacnggtgtngtagg
caccccncctccattcncagttcttancattgnggctantggtggngtna
tntatnttacaaaacgnaaaaaagnataa

SEQ ID NO: 256

MKKNKLLLATAILATALGTASLNQNVKAETAGVVSSGQLTIKKSITNFND
DTLLMPKTDYTFSVNPDSAATGTESNLPIKPGIAVNNQDIKVSYSNTDKT
SGKEKQVVVDFMKVTFPSVGIYRYVVTENKGTAEGVTYDDTKWLVDVYVG
NNEKGGLEPKYIVSKKGDSATKEPIQFNNSFETTSLKIEKKVTGNTGDHK
KAFNFTLTLQPNEYYEASSVVKTEENGQTKDVKIGEAYKFTLNDSQSVIL
SKLPVGINYKVEEAEANQGGYTTTATLKDGEKLSTYNLGQEHKTDKTADE
IVVTNXRDTXVPTGVVGTPPPFXVLXIXAXGGVXYXTKRKKX

[1159] There may be an upper limit to the number of GAS proteins which will be in the compositions of the invention. Preferably, the number of GAS proteins in a composition of the invention is less than 20, less than 19, less than 18, less than 17, less than 16, less than 15, less than 14, less than 13, less than 12, less than 11, less than 10, less than 9, less than 8, less than 7, less than 6, less than 5, less than 4, or less than 3. Still more preferably, the number of GAS proteins in a composition of the invention is less than 6, less than 5, or less than 4. Still more preferably, the number of GAS proteins in a composition of the invention is 3.

[1160] The GAS proteins and polynucleotides used in the invention are preferably isolated, i.e., separate and discrete, from the whole organism with which the molecule is found in nature or, when the polynucleotide or polypeptide is not found in nature, is sufficiently free of other biological macromolecules so that the polynucleotide or polypeptide can be used for its intended purpose.

Examples Other Gram Positive Bacterial Adhesin Island Sequences

[1161] The Gram positive bacteria AI polypeptides of the invention can, of course, be prepared by various means (e.g. recombinant expression, purification from a gram positive bacteria, chemical synthesis etc.) and in various forms (e.g. native, fusions, glycosylated, non-glycosylated etc.). They are preferably prepared in substantially pure form (i.e. substantially free from other streptococcal or host cell proteins) or substantially isolated form.

[1162] The Gram positive bacteria AI proteins of the invention may include polypeptide sequences having sequence identity to the identified Gram positive bacteria proteins. The degree of sequence identity may vary depending on the amino acid sequence (a) in question, but is preferably greater than 50% (e.g. 60%, 65%, 70%, 75%, 80%, 85%, 90%, 91%, 92%, 93%, 94%, 95%, 96%, 97%, 98%, 99%, 99.5% or more). Polypeptides having sequence identity include homologs, orthologs, allelic variants and mutants of the identified Gram positive bacteria proteins. Typically, 50% identity or more between two proteins is considered to be an indication of functional equivalence. Identity between proteins is preferably determined by the Smith-Waterman homology search algorithm as implemented in the MPSRCH program (Oxford Molecular), using an affinity gap search with parameters gap open penalty=12 and gap extension penalty=1.

[1163] The Gram positive bacteria adhesin island polynucleotide sequences may include polynucleotide sequences having sequence identity to the identified Gram positive bacteria adhesin island polynucleotide sequences. The degree of sequence identity may vary depending on the polynucleotide sequence in question, but is preferably greater than 50% (e.g. 60%, 65%, 70%, 75%, 80%, 85%, 90%, 91%, 92%, 93%, 94%, 95%, 96%, 97%, 98%, 99%, 99.5% or more).

[1164] The Gram positive bacteria adhesin island polynucleotide sequences of the invention may include polynucleotide fragments of the identified adhesin island sequences. The length of the fragment may vary depending on the polynucleotide sequence of the specific adhesin island sequence, but the fragment is preferably at least 10 consecutive polynucleotides, (e.g. at least 10, 12, 14, 16, 18, 20, 25, 30, 35, 40, 50, 60, 70, 80, 90, 100, 150, 200 or more).

[1165] The Gram positive bacteria adhesin island amino acid sequences of the invention may include polypeptide fragments of the identified Gram positive bacteria proteins. The length of the fragment may vary depending on the amino acid sequence of the specific Gram positive bacteria antigen, but the fragment is preferably at least 7 consecutive amino acids, (e.g. 8, 10, 12, 14, 16, 18, 20, 25, 30, 35, 40, 50, 60, 70, 80, 90, 100, 150, 200 or more). Preferably the fragment comprises one or more epitopes from the sequence. The fragment may comprise at least one T-cell or, preferably, a B-cell epitope of the sequence. T- and B-cell epitopes can be identified empirically (e.g., using PEPSCAN [Geysen et al. (1984) PNAS USA 81:39984002; Carter (1994) Methods Mol. Biol. 36:207-223, or similar methods], or they can be predicted (e.g., using the Jameson-Wolf antigenic index [Jameson, B A et al. 1988, CABIOS 4 (1):1818-186], matrix-based approaches [Raddrizzani and Hammer (2000) Brief Bioinform. 1(2):179-189], TEPITOPE [De Lalla et al. (199) J. Immunol. 163:1725-1729], neural networks [Brusic et al. (1998) Bioinformatics 14(2):121-130], OptiMer & EpiMer [Meister et al. (1995) Vaccine 13(6):581-591; Roberts et al. (1996) AIDS Res. Hum. Retroviruses 12(7):593-610], ADEPT [Maksyutov & Zagrebelnaya (1993) Comput. Appl. Biosci. 9(3):291-297], Tsites [Feller & de la Cruz (1991) Nature 349(6311):720-721], hydrophilicity [Hopp (1993) Peptide Research 6:183-190], antigenic index [Welling et al. (1985) FEBS Lett. 188:215-218] or the methods disclosed in Davenport et al. (1995) Immunogenetics 42:392-297, etc. Other preferred fragments include (1) the N-terminal signal peptides of each identified Gram positive bacteria protein, (2) the identified Gram positive bacteria protein without their N-terminal signal peptides, (3) each identified Gram positive bacteria protein wherein up to 10 amino acid residues (e.g. 1, 2, 3, 4, 5, 6, 7, 8, 9, 10, 15, 20, 25 or more) are deleted from the N-terminus and/or the C-terminus e.g. the N-terminal amino acid residue may be deleted. Other fragments omit one or more domains of the protein (e.g. omission of a signal peptide, of a cytoplasmic domain, of a transmembrane domain, or of an extracellular domain), and (4) the polypeptides, but without their N-terminal amino acid residue.

[1166] As indicated in the above text, nucleic acids and polypeptides of the invention may include sequences that:
[1167] (a) are identical (i.e., 100% identical) to the sequences disclosed in the sequence listing;
[1168] (b) share sequence identity with the sequences disclosed in the sequence listing;
[1169] (c) have 1, 2, 3, 4, 5, 6, 7, 8, 9, or 10 single nucleotide or amino acid alterations (deletions, insertions, substitutions), which may be at separate locations or may be contiguous, as compared to the sequences of (a) or (b);
[1170] (d) when aligned with a particular sequence from the sequence listing using a pairwise alignment algorithm, a moving window of x monomers (amino acids or nucleotides) moving from start (N-terminus or 5′) to end (C-terminus or 3′), such that for an alignment that extends top monomers (where p>x) there are p−x+1 such windows, each window has at least x·y identical aligned monomers, where: x is slected from 20, 25, 30, 35, 40, 45, 50, 60, 70, 80, 90, 100, 150, 200; y is selected from 0.50, 0.60, 0.70, 0.75, 0.80, 0.85, 0.90, 0.91, 0.92, 0.93, 0.94, 0.95, 0.96, 0.97, 0.98, 0.99; and if x·y is not an integer then it is rounded up to the nearest integer. The preferred pairwise alignment algorithm is the Needleman-Wunsch global alignment algorithm [Needlman &Wunsch (1970) J. Mol. Biol. 48, 443-453], using default parameters (e.g., with Gap opening penalty=10.0, and with Gap extension penalty=0.5, using the EBLOSUM62 scoring matrix). This algorithm is conveniently implemented in the needle tool in the EMBOSS package [Rice et al. (2000) Trends Genet. 16:276-277].

[1171] The nucleic acids and polypeptides of the inention may additionally have further sequences to the N-terminus/5′ and/or C-terminus/3′ of these sequences (a) to (d).

[1172] All of the Gram positive bacterial sequences referenced herein are publicly available through PubMed on GenBank.

Streptococcus pneumoniae Adhesin Island Sequences

[1173] As discussed above, a S. pneumoniae AI sequence is present in the TIGR4 S. pneumoniae genome. Examples of S. pneumoniae AI sequences are set forth below.

[1174] SrtD (Sp0468) is a sortase. An example of an amino acid sequence of SrtD is set forth in SEQ ID NO: 80.

SEQ ID NO: 80

MSRTKLRALLGYLLMLVACLIPIYCFGQMVLQSLGQVKGHATFVKSMTTE
MYQEQQNHSLAYNQRLASQNRTVDPFLAEGYEVNYQVSDDPDAVYGYLSI
PSLEIMEPVYLGADYHHLGMGLAHVDGTPLPLDGTGIRSVIAGHRAEPSH
VFFRHLDQLKVGDALYYDNGQEIVEYQMMDTEIILPSEWEKLESVSSKNI
MTLITCDPIPTFNKRLLVNFERVAVYQKSDPQTAAVARVAFTKEGQSVSR
VATSQWLYRGLVVLAFLGILFVLWKLARLLRGK

[1175] SrtC (Sp0467) is a sortase. An example of an amino acid sequence of SrtC is set forth in SEQ ID NO: 81.

SEQ ID NO: 81

MSRYYYRIESNEVIKEFDETVSQMDKAELEERWRLAQAENATLKPSEILD
PFTEQEKKKGVSEYANMLKVHERIGYVEIPAIDQEIPMYVGTSEDILQKG
AGLLEGASLPVGGENTHTVITAHRGLPTAELFSQLDKMKKGDIFYLHVLD
QVLAYQVDQIVTVEPNDFEPVLIQHGEDYATLLTCTPYMINSHRLLVRGK
RIPYTAPIAERNRAVRERGQFWLWLLLGAMAVILLLLYRVYRNRRIVKGL
EKQLEGRHVKD

[1176] SrtB (SP0466) is a sortase. An example of an amino acid sequence of SrtB is set forth in SEQ ID NO: 82.

SEQ ID NO: 82

MAVMAYPLVSRLYYRVESNQQIADFDKEKATLDEADIDERMKLAQAFNDS
LNNVVSGDPWSEEMKKKGRAEYARMLEIHERMGHVEIPVIDVDLPVYAGT
AEEVLQQGAGHLEGTSLPIGGNSTHAVITAHTGLPTAKMFTDLTKLKVGD
KFYVHNIKEVMAYQVDQVKVIEPTNFDDLLIVPGHDYVTLLTCTPYMINT
HRLLVRGHRIPYVAEVEEEFIAANKLSHLYRYLFYVAVCLIVTLLWITRR
LRKKKKQPEKALKALKAARKEVKVEDGQQ

[1177] Sp0465 is a hypothetical protein. An example of an amino acid sequence of Sp0465 is set forth in SEQ ID NO: 83.

SEQ ID NO: 83

MFLPFLSASLYLQTHHFIAFPNRQSYLLRETRKSHFFLIHHPF

[1178] RrgC (SP0464) is a cell wall surface anchor family protein. RrgC contains a sortase substrate motif VPXTG (SEQ ID NO: 137), shown in italics in SEQ ID NO: 84.

SEQ ID NO: 84

MISRIFFVMALCFSLVWGAHAVQAQEDHTLVLQLENYQEVVSQLPSRDGH
RLQVWKLDDSYSYDDRVQIVRDLHSWDENKLSSFKKTSFEMTFLENQIEV
SHIPNGLYYVRSIIQTDAVSYPAEFLFEMTDQTVEPLVIVAKKTDTMTTK
VKLIKVDQDHNRLEGVGFKLVSVARDVSEKEVPLIGEYRYSSSGQVGRTL
YTDKNGEIFVTNLPLGNYRFKEVEPLAGYAVTTLDTDVQLVDHQLVTITV
VNQKLPRGNVDFMKVDGRTNTSLQGAMFKVMKEESGHYTPVLQNGKEVVV
TSGKDGRFRVEGLEYGTYYLWELQAPTGYVQLTSPVSFTIGKDTRKELVT
VVKNNKRPRIDVPDTGEETLYILMLVAILLFGSGYYLTKKPNN

[1179] RrgB (Sp0463) is a cell wall surface anchor protein. RrgB contains a sortase substrate motif IPXTG (SEQ ID NO: 133), shown in italics in SEQ ID NO: 85.

SEQ ID NO: 85

MKSINKFLTMLAALLLTASSLFSAATVFAAGTTTTSVTVHKLLATDGDMD
KIANELETGNYAGNKVGVLPANAKEIAGVMFVWTNTNNEIIDENGQTLGV
NIDPQTFKLSGAMPATAMKKLTEAEGAKFNTANLPAAKYKIYEIHSLSTY
VGEDGATLTGSKAVPIEIELPLNDVVDAHVYPKNTEAKPKIDKDFKGKAN
PDTPRVDKDTPVNHQVGDVVEYEIVTKIPALANYATANWSDRMTEGLAFN
KGTVKVTVDDVALEAGDYALTEVATGFDLKLTDAGLAKVNDQNAEKTVKI
TYSATLNDKAIVEVPESNDVTFNYGNNPDHGNTPKPNKPNENGDLTLTKT
WVDATGAPIPAGAEATFDLVNAQTGKVVQTVTLTTDKNTVTVNGLDKNTE
YKFVERSIKGYSADYQEITTAGEIAVKNWKDENPKPLDPTEPKVVTYGKK
FVKVNDKDNRLAGAEFVIANADNAGQYLARKADKVSQEEKQLVVTTKDAL
DRAVAAYNALTAQQQTQQEKEKVDKAQAAYNAAVIAANNAFEWVADKDNE
NVVKLVSDAQGRFEITGLLAGTYYLEETKQPAGYALLTSRQKFEVTATSY
SATGQGIEYTAGSGKDDATKVVNKKITIPQTGGIGTIIFAVAGAAIMGIA
VYAYVKNNKDEDQLA

[1180] RrgA (Sp0462) is a cell wall surface anchor protein. RrgA contains a sortase substrate motif YPXTG (SEQ ID NO: 186), indicated in italics in SEQ ID NO: 86.

SEQ ID NO: 86

MLNRETHMKKVRKIFQKAVAGLCCISQLTAFSSIVALAETPETSPAIGKV
VIKETGEGGALLGDAVFELKNNTDGTTVSQRTEAQTGEAIFSNIKPGTYT
LTEAQPPVGYKPSTKQWTVEVEKNGRTTVQGEQVENREEALSDQYPQTGT
YPDVQTPYQIIKVDGSEKNGQHKALNPNPYERVIPEGTLSKRIYQVNNLD
DNQYGIELTVSGKTVYEQKDKSVPLDVVILLDNSNSMSNIRNKNARRAER
AGEATRSLIDKITSDSENRVALVTYASTIFDGTEFTVEKGVADKNGKRLN
DSLFWNYDQTSFTTNTKDYSYLKLTNDKNDIVELKNKVPTEAEDHDGNRL
MYQFGATFTQKALMKADEILTQQARQNSQKVIFHITDGVPTMSYPINFNH
ATFAPSYQNQLNAFFSKSPNKDGILLSDFITQATSGEHTIVRGDGQSYQM
FTDKTVYEKGAPAAFPVKPEKYSEMKAAGYAVIGDPINGGYIWLNWRESI
LAYPFNSNTAKITNHGDPTRWYYNGNIAPDGYDVFTVGIGINGDPGTDEA
TATSFMQSISSKPENYTNVTDTTKILEQLNRYFHTIVTEKKSIENGTITD
PMGELIDLQLGTDGRFDPADYTLTANDGSRLENGQAVGGPQNDGGLLKNA
KVLYDTTEKRIRVTGLYLGTDEKVTLTYNVRLNDEFVSNKFYDTNGRTTL
HPKEVEQNTVRDFPIPKIRDVRKYPEITISKEKKLGDIEFIDVNDNDKKP
LRGAVFSLQKQHPDYPDIYGAIDQNGTYQNVRTGEDGKLTFKNLSDGKYR
LFENSEPAGYKPVQNKPIVAFQIVNGEVRDVTSIVPQDIPAGYEFTNDKH
YITNEPIPPKREYPRTGGIGMLPFYLIGCMMMGGVLLYTRKHP

[1181] RlrA (Sp0461) is a transcriptional regulator. An example of an amino acid sequence for RlrA is set forth in SEQ ID NO: 87.

SEQ ID NO: 87

MLNKYIEKRITDKITILNILLDIRSIELDELSTLTSLQSKSLLSILQELQ
ETFEEELTFNLDTQQVQLIEHHSHQTNYYFHQLYNQSTILKILRFFLLQG
NQSFNEFTQKEYISIATGYRVRQKCGLLLRSVGLDLVKNQVVGPEYRIRF
LIALLQFHFGTEIYDLNDGSMDWVTHMIVQSNSQLSHELLEITPDEYVHF
SILVALTWKRREFPLEFPESKEFEKLKNLFMYPILMEHCQTYLEPHANMT
FTQEELDYIFLVYCSANSSFSKDKWNQEKKTHTIQLILQHTRGKHLLSKE
KNILGNDISNSLSFLTALTFLTRTFLFGLQNLVPYYNYYEHYGIESDKPL
YHISKAIVQEWMTEQKIEGVIDQHRLYLESLYLTETIFSSLPAIPIKIIL
NNQADVNLTKSIILRNFTDKVASVTGYNILISPPPSEEHLTEPLIIITTK
EYLPYVKKQYPKGKHHFLTIALDLHVSQQRLIYQTIVDIRKEAFDKRVAM
IAKKAHYLL

[1182] As discussed above, a S. pneumoniae AI sequence is present in the S. pneumoniae strain 670 genome. Examples of S. pneumoniae AI sequences are set forth below.

[1183] Orf1_{—}670 is a transposase. An example of an amino acid sequence of orf1_{—}670 is set forth in SEQ ID NO: 171.

SEQ ID NO: 171

MEHINHTTLLIGIKDKNITLNKAIQHDTHIEVFATLDYHPPKCKHCKGKQ
IKYDFQKPSKIPFIEIGGFPSLIHLKKRRFQCKSCRKVTVAETTLVQKNC
QISEMVRQKIAQLLLNREALTHIASKLAISTSTSTVYRKLKQFHFQEDYT
TLPEILSWDEFSYQKGKLAFIAQDFNTKKIMTILDNRRQTTIRNHFFKYS
KEARKKVKVVTVDMSGSYIPLIKKLFPNAKIVLDRFHIVQHMSRALNQTR
INIMKQFDDKSLEYRALKYYWKFILKDSRKLSLKPFYARTFRETLTPREC
LKKTFTLVPELKDYYDLYQLLLFHLQEKNTDQFWGLIQDTLPHLNRTFKT
TLSTFICYKNYITNAIELPYSNAKLEATNKLIKDIKRNAFGFRNFENFKK
RIFIALNTKKERTKFVLSRA

[1184] Orf2_{—}670 is a transcriptional regulator. An example of an amino acid sequence of Orf2_{—}670 is set forth in SEQ ID NO: 172.

SEQ ID NO: 172

MLNKYIEKRITDKITILNILLDIRSIELDELSTLTSLQSKSLLSILQELQ
ETFEEELTFNLDTQQVQLIEHHSHQTNYYFHQLYNQSTILKILRFFLLQG
NQSFNEFTQKEYISIATGYRVRQKCGLLLRSVGLDLVKNQVVGPEYRIRF
LIALLQFHFGIEIYDLNDGSMDWVTHMIVQSNSQLSHELLEITPDEYVHF
SILVALTWKRREFPLEFPESKEFEKLKNLFMYPILMEHCQTYLEPHANMT
FTQEELDYIFLVYCSANSSFSKDKWNQEKKTHTIQLILQHTRGKHLLSKF
KNILGNDISNSLSFLTALTFLTRTFLFGLQNLVPYYNYYEHYGIESDKPL
YHISKAIVQEWMTEQKIEGVIDQHRLYLFSLYLTETIFSSLPAIPIFIIL
NNQADVNLIKSIILRNETDKVASVTGYNILISPPPSEEHLTEPLIIITTK
EYLPYVKKQYPKGKHHFLTIALDLHVSQQRLIYQTIVDIRKEAFDKRVAM
IAKKAHYLL

[1185] Orf3_{—}670 is a cell wall surface anchor family proten. An example of an amino acid sequence of Orf3_{—}670 is set forth in SEQ ID NO: 173.

SEQ ID NO: 173

MLNRETHMKKVRKIFQKAVAGLCCISQLTAFSSIVALAETPETSPAIGKV
VIKETGEGGALLGDAVFELKNNTDGTTVSQRTEAQTGEAIFSNIKPGTYT
LTEAQPPVGYKPSTKQWTVEVEKNGRTTVQGEQVENREEALSDQYPQTGT
YPDVQTPYQIIKVDGSEKNGQHKALNPNPYERVIPEGTLSKRIYQVNNLD
DNQYGIELTVSGKTTVETKEASTPLDVVILLDNSNSMSNIRHNHAHRAEK
AGEATPALVDKITSNPDNRVALVTYGSTIFDGSEATVEKGVADANGKILN
DSALWTEDRTTFTAKTYNYSFLNLTSDPTDIQTIKDRIPSDAEELNKDKL
MYQFGATFTQKALMTADDILTKQARPNSKKVIFHITDGVPTMSYPINFKY
TGTTQSYRTQLNNFKAKTPNSSGILLEDFVTWSADGEHKIVRGDGESYQM
FTKKPVTDQYGVHQILSITSMEQRAKLVSAGYRFYGTDLYLYWRDSILAY
PFNSSTDWITNHGDPTTWYYNGNMAQDGYDVFTVGVGVNGDPGTDEATAT
RFMQSISSSPDNYTNVADPSQILQELNRYFYTIVNEKKSIENGTITDPMG
ELIDFQLGADGRFDPADYTLTANDGSSLVNNVPTGGPQNDGGLLKNAKVF
YDTTEKRIRVTGLYLGTGEKVTLTYNVRLNDQFVSNKFYDTNGRTTLHPK
EVEKNTVRDFPIPKIRDVRKYPEITIPKEKKLGEIEFIKINKNDKKPLRD
AVFSLQKQHPDYPDIYGAIDQNGTYQNVRTGEDGKLTFKNLSDGKYRLFE
NSEPAGYKPVQNKPIVAFQIVNGEVRDVTSIVPQDIPAGYEFTNDKHYIT
NEPIPPKREYPRTGGIGMLPFYLIGCMMMGGVLLYTRKHP

[1186] Orf4_{—}670 is a cell wall surface anchor family protein. An example of an amino acid sequence of orf4_{—}670 is set forth in SEQ ID NO: 174.

SEQ ID NO: 174

MKSINKFLTMLAALLLTASSLFSAATVFAADNVSTAPDAVTKTLTIHKLL
LSEDDLKTWDTNGPKGYDGTQSSLKDLTGVVAEEIPNVYFELQKYNLTDG
KEKENLKDDSKWTTVHGGLTTKDGLKIETSTLKGVYRIREDRTKTTYVGP
NGQVLTGSKAVPALVTLPLVNNNGTVIDAHVFPKNSYNKPVVDKRIADTL
NYNDQNGLSIGTKIPYVVNTTIPSNATFATSFWSDEMTEGLTYNEDVTIT
LNNVAMDQADYEVTKGNNGFNLKLTEAGLAKINGKDADQKIQITYSATLN
SLAVADIPESNDITYHYGNHQDHGNTPKPTKPNNGQITVTKTWDSQPAPE
GVKATVQLVNAKTGEKVGAPVELSENNWTYTWSGLDNSIEYKVEEEYNGY
SAEYTVESKGKLGVKNWKDNNPAPINPEEPRVKTYGKKFVKVDQKDTRLE
NAQFVVKKADSNKYIAFKSTAQQAADEKAAATAKQKLDAAVAAYTNAADK
QAAQALVDQAQQEYNVAYKEAKFGYVEVAGKDEAMVLTSNTDGQFQISGL
AAGTYKLEEIKAPEGFAKIDDVEFVVGAGSWNQGEFNYLKDVQKNDATKV
VNKKITIPQTGGIGTIIFAVAGAAIMGIAVYAYVKNNKDEDQLA

[1187] Orf5_{—}670 is a cell wall surface anchor family protein. An example of an amino acid sequence of orf5_{—}670 is set forth in SEQ ID NO: 175.

SEQ ID NO: 175

MTMQKMQKMISRIFFVMALCFSLVWGAHAVQAQEDHTLVLQLENYQEVVS
QLPSRDGHRLQVWKLDDSYSYDDRVQIVRDLHSWDENKSLLFKKTSFEMT
FLENQIEVSHIPNGLYYVRSIIQTDAVSYPAEFLFEMTDQTVEPLVIVAK
KTDTMTTKVKLIKVDQDHNRLEGVGFKLVSVARDGSEKEVPLIGEYRYSS
SGQVGRTLYTDKNGEIFVTNLPLGNYRFKEVEPLAGYAVTTLDTDVQLVD
HQLVTTTVVNQKLPRGNVDFMKVDGRTNTSLQGAMFKVMKEESGHYTPVL
QNGKEVVVTSGKDGRFRVEGLEYGTYYLWELQAPTGYVQLTSPVSFTIGK
DTRKELVTVVKNNKRPRIDVPDTGEETLYILMLVAILLFGSGYYLTKKPN
N

[1188] Orf6_{—}670 is a sortase. An example of an amino acid sequence of orf6_{—}670 is set forth in SEQ ID NO: 176.

SEQ ID NO: 176

MLIKMVKTKKQKRNNLLLGVVFFIGMAVMAYPLVSRLYYRVESNQQIADF
DKEKATLDEADIDERMKLAQAFNDSLNNVVSGDPWSEEMKKKGRAEYARM
LEIHERMGHVEIPVIDVDLPVYAGTAEEVLQQGAGHLEGTSLPIGGNSTH
AVITAHTGLPTAKMFTDLTKLKVGDKFYVHNIKEVMAYQVDQVKVIEPTN
FDDLLIVPGHDYVTLLTCTPYMINTHRLLVRGHRIPYVAEVEEEFIAANK
LSHLYRYLFYVAVGLIVILLWIIRRLRKKKKQPEKALKALKAARKEVKVE
DGQQ

[1189] Orf7_{—}670 is a sortase. An example of an amino acid sequence of orf7_{—}670 is set forth in SEQ ID NO: 177.

SEQ ID NO: 177

VSRYYYRIESNEVIKEFDETVSQMDKAELEERWRLAQAFNATLKPSEILD
PFTEQEKKKGVSEYANMLKVHERIGYVEIPAIDQEIPMYVGTSEEILQKG
AGLLEGASLPVGGENTHTVVTAHRGLPTAELFSQLDKMKKGDVFYLHVLD
QVLAYQVDQILTVEPNDEEPVLIQHGEDYATLLTCTPYMINSHRLLVRGK
RIPYTAPTAERNRAVRERGQFWLWLLLAALVMILVLSYGVYRHRRIVKGL
EKQLEEHHVKG

[1190] Orf8_{—}670 is a sortase. An example of an amino acid sequence of orf8_{—}670 is set forth in SEQ ID NO: 178.

SEQ ID NO: 178

MSKAKLQKLLGYLLMLVALVIPVYCEGQMVLQSLGQVKGHEIFSESVTAD
SYQEQLQRSLDYNQRLDSQNRIVDPFLAEGYEVNYQVSDDPDAVYGYLSI
PSLEIMEPVYLGADYHHLAMGLAHVDGTPLPVEGKGIRSVIAGHRAEPSH
VFFRHLDQLKVGDALYYDNGQEIVEYQMMDTEIILPSEWEKLESVSSKNI
MTLITCDPIPTFNKRLLVNFERVAVYQKSDPQTAAVARVAFTKEGQSVSR
VATSQWLYRGLVVLAFLGILFVLWKLARLLRGK

[1191] As discussed above, a S. pneumoniae AI sequence is present in the 19A Hungary 6 S. pneumoniae genome. Examples of S. pneumoniae AI sequences from 19A Hungary 6 are set forth below.

[1192] ORF2_{—}19AH is a transcriptional regulator. An example of an amino acid sequence of ORF2_{—}19AH is set forth in SEQ ID NO: 187.

SEQ ID NO: 187

MLNKYIEKRITDKITILNILLDIRSIELDELSTLTSLQSKSLLSILQELQ
ETFEEELTFNLDTQQVQLIEHHSHQTNYYFHQLYNQSTILKILRFFLLQG
NQSFNEFTQKEYISIATGYRVRQKCGLLLRSVGLDLVKNQVVGPEYRIRF
LIALLQFHFGIEIYDLNDGSMDWVTHMIVQSNSQLSHELLEITPDEYVHF
SILVALTWKRREFPLEFPESKEFEKLKNLFMYPILMEHCQTYLEPHANMT
FTQEELDYIFLVYCSANSSFSKDKWNQEKKTHTIQLILQHTRGKHLLSKF
KNILGNDISNSLSFLTALTFLTRTFLFGLQNLVPYYNYYEHYGIESDKPL
YHISKAIVQEWMTEQKIEGVTDQHRLYLFSLYLTETIFSSLPAIPIFIIL
NNQADVNLIKSTILRNFTDKVASVTGYNILISPPPSEEHLTEPLIIITTK
EYLPYVKKQYPKGKHHFLTIALDLHVSQQRLIYQTIVDIRKEAFDKRVAM
IAKKAHYLL

[1193] ORF3_{—}19AH is a cell wall surface protein. An example of an amino acid sequence of ORF3_{—}19AH is set forth in SEQ ID NO: 188.

SEQ ID NO: 188

MKKVRKIFQKAVAGLCCISQLTAFSSIVALAETPETSPAIGKVVIKETGE
GGALLGDAVFELKNNTDGTTVSQRTEAQTGEAIFSNIKPGTYTLTEAQPP
VGYKPSTKQWTVEVEKNGRTTVQGEQVENREEALSDQYPQTGTYPDVQTP
YQIIKVDGSEKNGQHKALNPNPYERVIPEGTLSKRIYQVNNLDDNQYGIE
LTVSGKTTVETKEASTPLDVVILLDNSNSMSNTRHNHAHRAEKAGEATRA
LVDKITSNPDNRVALVTYGSTIFDGSEATVEKGVADANGKILNDSALWTF
DRTTFTAKTYNYSFLNLTSDPTDIQTIKDRIPSDAEELNKDKLMYQFGAT
FTQKALMTADDILTKQARPNSKKVIFHITDGVPTMSYPINFKYTGTTQSY
RTQLNNFKAKTPNSSGILLEDFVTWSADGEHKIVRGDGESYQMFTKKPVT
DQYGVHQILSITSMEQRAKLVSAGYRFYGTDLYLYWRDSILAYPFNSSTD
WITNHGDPTTWYYNGNMAQDGYDVFTVGVGVNGDPGTDEATATRFMQSIS
SSPDNYTNVADPSQILQELNRYFYTTVNEKKSIENGTITDPMGELIDFQL
GADGRFDPADYTLTANDGSSLVNNVPTGGPQNDGGLLKNAKVFYDTTEKR
IRVTGLYLGTGEKVTLTYNVRLNDQFVSNKFYDTNGRTTLHPKEVEKNTV
RDFPIPKIRDVRKYPEITIPKEKKLGETEFIKINKNDKKPLRDAVFSLQK
QHPDYPDIYGAIDQNGTYQNVRTGEDGKLTFKNLSDGKYRLFENSEPAGY
KPVQNKPIVAFQIVNGEVRDVTSIVPQDIPAGYEFTNDKHYITNEPIPPK
REYPRTGGIGMLPFYLIGCMMMGGVLLYTRKNP

[1194] ORF4_{—}19AH is a cell wall surface protein. An example of an amino acid sequence of ORF4_{—}19AH is set forth in SEQ ID NO: 189.

SEQ ID NO: 189

MKSINKFLTMLAALLLTASSLFSAATVFAADNVSTAPDAVTKTLTIHKLL
LSEDDLKTWDTNGPKGYDGTQSSLKDLTGVVAEEIPNVYFELQKYNLTDG
KEKENLKDDSKWTTVHGGLTTKDGLKIETSTLKGVYRIREDRTKTTYVGP
NGQVLTGSKAVPALVTLPLVNNNGTVTDAHVFPKNSYNKPVVDKRIADTL
NYNDQNGLSIGTKTPYVVNTTIPSNATFATSFWSDEMTEGLTYNEDVTIT
LNNVAMDQADYEVTKGXNGFNLKLTEAGLAKINGKDADQKIQITYSATLN
SLAVADIPESNDITYHYGNHQDHGNTPKPTKPNNGQITVTKTWDSQPAPE
GVKATVQLVNAKTGEKVGAPVELSENNWTYTWSGLDNSIEYKVEEEYNGY
SAEYTVESKGKLGVKNWKDNNPAPINPEEPRVKTYGKKFVKVDQKDTRLE
NAQFVVKKADSNKYIAFKSTAQQAADEKAAATAKQKLDAAVAAYTNAADK
QAAQALVDQAQQEYNVAYKEAKEGYVEVAGKDEAMVLTSNTDGQFQISGL
AAGTYKLEEIKAPEGFAKIDDVEFVVGAGSWNQGEFNYLKDVQKNDATKV
VNKKITIPQTGGIGTIIFAVAGAAIMGIAVYAYVKNNKDEDQLA

[1195] ORF5_{—}19AH is a cell wall surface protein. An example of an amino acid sequence of ORF5_{—}19AH is set forth in SEQ ID NO: 190.

SEQ ID NO: 190

MTMQKMQKMISRIFFVMALCPSLVWGAHAVQAQEDHTLVLQLENYQEVVS
QLPSRDGHRLQVWKLDDSYSYDDRVQIVRDLHSWDENKLSSEKKTSFEMT
FLENQIEVSHIPNGLYYVRSIIQTDAVSYPAEELFEMTDQTVEPLVIVAK
KTDTMTTKVKLIKVDQDHNRLEGVGFKLVSVARDGSEKEVPLIGEYRYSS
SGQVGRTLYTDKNGEIFVTNLPLGNYRFKEVEPLAGYAVTTLDTDVQLVD
HQLVTITVVNQKLPRGNVDEMKVDGRTNTSLQGAMFKVMKEESGHYTPVL
QNGKEVVVTSGKDGRFRVEGLEYGTYYLWELQAPTGYVQLTSPVSETIGK
DTRKELVTVVKNNKRPRTDVPDTGEETLYILMLVAILLFGSGYYLTKKPN
N

[1196] ORF6_{—}19AH is a putative sortase. An example of an amino acid sequence of ORF6_{—}19AH is set forth in SEQ ID NO: 191.

SEQ ID NO: 191

MLIKMVKTKKQKRNNLLLGVVFFIGMAVMAYPLVSRLYYRVESNQQTADF
DKEKATLDEADIDERMKLAQAFNDSLNNVVSGDPWSEEMKKKGRAEYARM
LEIHERMGHVEIPVIDVDLPVYAGTAEEVLQQGAGHLEGTSLPIGGNSTH
AVITAHTGLPTAKMFTDLTKLKVGDKFYVHNIKEVMAYQVDQVKVIEPTN
FDDLLIVPGHDYVTLLTCTPYMINTHRLLVRGHRIPYVAEVEEEFIAANK
LSHLYRYLFYVAVGLIVILLWIIRRLRKKKKQPEKALKALKAARKEVKVE
DGQQ

[1197] ORF7_{—}19AH is a putative sortase. An example of an amino acid sequence of ORF7_{—}19AH is set forth in SEQ ID NO: 192.

SEQ ID NO: 192

MDNSRRSRKKGTKKKKHPLILLLIFLVGFAVAIYPLVSRYYYRIESNEVI
KEFDETVSQMDKAELEERWRLAQAFNATLKPSEILDPFTEQEKKKGVSEY
ANMLKVHERIGYVEIPAIDQEIPMYVGTSEEILQKGAGLLEGASLPVGGE
NTHTVVTAHRGLPTAELFSQLDKMKKGDVFYLHVLDQVLAYQVDQILTVE
PNDFEPVLIQHGEDYATLLTCTPYMINSHRLLVRGKRIPYTAPIAERNRA
VRERGQFWLWLLLAALVMILVLSYGVYRHRRIVKGLEKQLEEHHVKG

[1198] ORF8_{—}19AH is a putative sortase. An example of an amino acid sequence of ORF8_{—}19AH is set forth in SEQ ID NO: 193.

SEQ ID NO: 193

MSKAKLQKLLGYLLMLVALVIPVYCFGQMVLQSLGQVKGHEIFSESVTAD
SYQEQLQRSLDYNQRLDSQNRIVDPFLAEGYEVNYQVSDDPDAVYGYLSI
PSLEIMEPVYLGADYHHLAMGLAHVDGTPLPVEGKGIRSVIAGHPAEPSH
VFFRHLDQLKVGDALYYDNGQEIVEYQMMDTEIILPSEWEKLESVSSKNI
MTLITCDPIPTFNKRLLVNFERVAVYQKSDPQTAAVARVAFTKEGQSVSR
VATSQWLYRGLVVLAFMGILFVLWKLARLLRGK

[1199] As discussed above, a S. pneumoniae AI sequence is present in the 6B Finland 12 S. pneumoniae genome. Examples of S. pneumoniae AI sequences from 6B Finland 12 are set forth below.

[1200] ORF2_{—}6BF is a transcriptional regulator. An example of an amino acid sequence of ORF2_{—}6BF is set forth in SEQ ID NO: 194.

SEQ ID NO: 194

MLNKYIEKRITDKITILNILLDIRSIELDELSTLTSLQSKSLLSILQELQ
ETFEEELTFNLDTQQVQLIEHHSHQTNYYFHQLYNQSTILKILRFFLLQG
NQSENEFTQKEYISIATGYRVRQKCGLLLRSVGLDLVKNQVVGPEYRIRF
LIALLQFHFGIEIYDLNDGSMDWVTHMIVQSNSQLSHELLEITPDEYVHF
SILVALTWKRREFPLEFPESKEFEKLKNLFMYPILMEHGQTYLEPHANMT
FTQEELDYIFLVYCSANSSFSKDKWNQEKKTHTIQLILQHTRGKHLLSKF
KNILGNDISNSLSFLTALTFLTRTFLFGLQNLVPYYNYYEHYGIESDKPL
YHISKAIVQEWMTEQKIEGVIDQHRLYLFSLYLTETIFSSLPAIPIFIIL
NNQADVNLIKSIILRNFTDKVASVTGYNILISPPPSEEHLTEPLIIITTK
EYLPYVKKQYPKGKHHFLTIALDLHVSQQRLIYQTIVDIRKEAFDKRVAM
IAKKAHYLL

[1201] ORF3_{—}6BF is a cell wall surface protein. An example of an amino acid sequence of ORF3_{—}6BF is set forth in SEQ ID NO: 195.

SEQ ID NO: 195

MKKVRKIFQKAVAGLCCISQLTAFSSIVALAETPETSPAIGKVVIKETGE
GGALLGDAVFELKNNTDGTTVSQRTEAQTGEAIFSNIKPGTYTLTEAQPP
VGYKPSTKQWTVEVEKNGRTTVQGEQVENREEALSDQYPQTGTYPDVQTP
YQIIKVDGSEKNGQHKALNPNPYERVIPEGTLSKRTYQVNNLDDNQYGIE
LTVSGKTTVETKEASTPLDVVILLDNSNSMSNIRHNHAHRAEKAGEATRA
LVDKITSNPDNRVALVTYGSTIFDGSEATVEKGVADANGKILNDSALWTF
DRTTFTAKTYNYSFLNLTSDPTDIQTIKDRIPSDAEELNKDKLMYQFGAT
FTQKALMTADDILTKQARPNSKKVIFHITDGVPTMSYPINFKYTGTTQSY
RTQLNNFKAKTPNSSGILLEDFVTWSADGEHKIVRGDGESYQMFTKKPVT
DQYGVHQILSITSMEQRAKLVSAGYRFYGTDLYLYWRDSILAYPFNSSTD
WITNHGDPTTWYYNGNMAQDGYDVFTVGVGVNGDPGTDEATATRFMQSIS
SSPDNYTNVADPSQILQELNRYFYTIVNEKKSIENGTITDPMGELIDFQL
GADGRFDPADYTLTANDGSSLVNNVPTGGPQNDGGLLKNAKVFYDTTEKR
IRVTGLYLGTGEKVTLTYNVRLNDQFVSNKEYDTNGRTTLHPKEVEKNTV
RDFPIPKIRDVRKYPEITTPKEKKLGEIEFIKINKNDKKPLRDAVFSLQK
QHPDYPDIYGAIDQNGTYQNVRTGEDGKLTFKNLSDGKYRLFENSEPAGY
KPVQNKPIVAFQIVNGEVRDVTSIVPQDIPAGYEFTNDKHYITNEPIPPK
REYPRTGGIGMLPEYLIGCMMMGGVLLYTRKHP

[1202] ORF4_{—}6BF is a cell wall surface protein. An example of an amino acid sequence of ORF4_{—}6BF is set forth in SEQ ID NO: 196.

SEQ ID NO: 196

MKSINKFLTMLAALLLTASSLFSAATVFAADNVSTAPDAVTKTLTIHKLL
LSEDDLKTWDTNGPKGYDGTQSSLKDLTGVVAEEIPNVYFELQKYNLTDG
KEKENLKDDSKWTTVHGGLTTKDGLKIETSTLKGVYRIREDRTKTTYVGP
NGQVLTGSKAVPALVTLPLVNNNGTVIDAHVFPKNSYNKPVVDKRIADTL
NYNDQNGLSIGTKIPYVVNTTIPSNATFATSFWSDEMTEGLTYNEDVTIT
LNNVAMDQADYEVTKGNNGFNLKLTEAGLAKINGKDADQKIQITYSATLN
SLAVADIPESNDITYHYGNHQDHGNTPKPTKPNNGQITVTKTWDSQPAPE
GVKATVQLVNAKTGEKVGAPVELSENNWTYTWSGLDNSIEYKVEEEYNGY
SAEYTVESKGKLGVKNWKDNNPAPINPEEPRVKTYGKKFVKVDQKDTRLE
NAQFVVKKADSNKYIAFKSTAQQAADEKAAATAKQKLDAAVAAYTNAADK
QAAQALVDQAQQEYNVAYKEAKFGYVEVAGKDEAMVLTSNTDGQFQISGL
AAGTYKLEEIKAPEGFAKIDDVEFVVGAGSWNQGEFNYLKDVQKNDATKV
VNKKITIPQTGGIGTIIEAVAGAAIMGIAVYAYVKNNKDEDQLA

[1203] ORF5_{—}6BF is a cell wall surface protein. An example of an amino acid sequence of ORF5_{—}6BF is set forth in SEQ ID NO: 197.

SEQ ID NO: 197

MTMQKMQKMISRIFFVMALCFSLVWGAHAVQAQEDHTLVLQLENYQEVVS
QLPSRDGHRLQVWKLDDSYSYDDRVQIVRDLHSWDENKLSSFKKTSFEMT
FLENQIEVSHIPNGLYYVRSIIQTDAVSYPAEFLFEMTDQTVEPLVIVAK
KTDTMTTKVKLIKVDQDHNRLEGVGFKLVSVARDGSEKEVPLIGEYRYSS
SGQVGRTLYTDKNGEIFVTNLPLGNYRFKEVEPLAGYAVTTLDTDVQLVD
HQLVTITVVNQKLPRGNVDFMKVDGRTNTSLQGAMFKVMKEESGHYTPVL
QNGKEVVVTSGKDGRFRVEGLEYGTYYLWELQAPTGYVQLTSPVSFTIGK
DTRKELVTVVKNNKRPRIDVPDTGEETLYILMLVAILLFGSGYYLTKKPN
N

[1204] ORF6_{—}6BF is a putative sortase. An example of an amino acid sequence of ORF6_{—}6BF is set forth in SEQ ID NO: 198.

SEQ ID NO: 198

MLIKMVKTKKQKRNNLLLGVVFFIGMAVMAYPLVSRLYYRVESNQQIADF
DKEKATLDEADIDERMKLAQAFNDSLNNVVSGDPWSEEMKKKGRAEYARM
LEIHERMGHVEIPVIDVDLPVYAGTAEEVLQQGAGHLEGTSLPTGGNSTH
AVITAHTGLPTAKMFTDLTKLKVGDKFYVHNIKEVMAYQVDQVKVIEPTN
FDDLLIVPGHDYVTLLTCTPYMINTHRLLVRGHRIPYVAEVEEEFIAANK
LSHLYRYLFYVAVGLIVILLWIIRRLRKKKKQPEKALKALKAARKEVKVE
DGQQ

[1205] ORF7_{—}6BF is a putative sortase. An example of an amino acid sequence of ORF7_{—}6BF is set forth in SEQ ID NO: 199.

SEQ ID NO: 199

MDNSRRSRKKGTKKKKHPLILLLIFLVGFAVAIYPLVSRYYYRIESNEVI
KEFDETVSQMDKAELEERWRLAQAFNATLKPSEILDPFTEQEKKKGVSEY
ANMLKVHERIGYVEIPAIDQEIPMYVGTSEEILQKGAGLLEGASLPVGGE
NTHTVVTAHRGLPTAELFSQLDKMKKGDVFYLHVLDQVLAYQVDQILTVE
PNDFEPVLIQHGEDYATLLTCTPYMINSHRLLVRGKRIPYTAPIAERNRA
VRERGQFWLWLLLAALVMILVLSYGVYRHRRIVKGLEKQLEEHHVKG

[1206] ORF8_{—}6BF is a putative sortase. An example of an amino acid sequence of ORF8_{—}6BF is set forth in SEQ ID NO: 200.

SEQ ID NO: 200

MSKAKLQKLLGYLLMLVALVTPVYCFGQMVLQSLGQVKGHEIFSESVTAD
SYQEQLQRSLDYNQRLDSQNRIVDPFLAEGYEVNYQVSDDPDAVYGYLSI
PSLETMEPVYLGADYHHLAMGLAHVDGTPLPVEGKGIRSVIAGHRAEPSH
VFFRHLDQLKVGDALYYDNGQEIVEYQMMDTEIILPSEWEKLESVSSKNI
MTLITCDPIPTFNKRLLVNFERVAVYQKSDPQTAAVARVAPTKEGQSVSR
VATSQWLYRGLVVLAFLGILFVLWKLARLLRGK

[1207] As discussed above, a S. pneumoniae AI sequence is present in the 6B Spain 2 S. pneumoniae genome. Examples of S. pneumoniae AI sequences from 6B Spain 2 are set forth below.

[1208] ORF2_{—}6BSP is a transcriptional regulator. An example of an amino acid sequence of ORF2_{—}6BSP is set forth in SEQ ID NO: 201.

SEQ ID NO: 201

MLNKYIEKRITDKITILNILLDIRSIELDELSTLTSLQSKSLLSTLQELQ
ETFEEELTFNLDTQQVQLTEHHSHQTNYYFHQLYNQSTILKILRFFLLQG
NQSFNEFTQKEYISIATGYRVRQKCGLLLRSVGLDLVKNQVVGPEYRIRF
LIALLQFHFGIEIYDLNDGSMDWVTHMIVQSNSQLSHELLEITPDEYVHF
SILVALTWKRREFPLEFPESKEFEKLKNLFMYPILMEHCQTYLEPHANMT
FTQEELDYIFLVYCSANSSFSKDKWNQEKKTHTIQLILQHTRGKHLLSKF
KNILGNDISNSLSPLTALTFLTRTFLFGLQNLVPYYNYYEHYGIESDKPL
YHISKAIVQEWMTEQKIEGVIDQHRLYLFSLYLTETIFSSLPAIPIFITL
NNQADVNLTKSIILRNFTDKVASVTGYNILISPPPSEEHLTEPLIIITTK
EYLPYVKKQYPKGKHHFLTIALDLHVSQQRLIYQTIVDTRKEAFDKRVAM
IAKKAHYLL

[1209] ORF3_{—}6BSP is a cell wall surface protein. An example of an amino acid sequence of ORF3_{—}6BSP is set forth in SEQ ID NO: 202.

SEQ ID NO: 202

MKKVRKIFQKAVAGLCCISQLTAFSSIVALAETPETSPAIGKVVIKETGE
GGALLGDAVFELKNNTDGTTVSQRTEAQTGEAIFSNIKPGTYTLTEAQPP
VGYKPSTKQWTVEVEKNGRTTVQGEQVENREEALSDQYPQTGTYPDVQTP
YQIIKVDGSEKNGQHKALNPNPYERVIPEGTLSKRIYQVNNLDDNQYGIE
LTVSGKTTVETKEASTPLDVVILLDNSNSMSNIRHNHAHRAEKAGEATRA
LVDKITSNPDNRVALVTYGSTIFDGSEATVEKGVADANGKILNDSALWTF
DRTTFTAKTYNYSFLNLTSDPTDIQTIKDRIPSDAEELNKDKLMYQFGAT
FTQKALMTAKKILTKQARPNSKKVIFHITDGVPTMSYPINFKYTGTTQSY
RTQLNNFKAKTPNSSGILLEDFVTWSADGEHKIVRGDGESYQMFTKKPVT
DQYGVHQILSITSMEQRAKLVSAGYRFYGTDLYLYWRDSILAYPFNSSTD
WITNHGDPTTWYYNGNMAQDGYDVFTVGVGVNGDPGTDEATATRFMQSIS
SSPDNYTNVADPSQILQELNRYEYTIVNEKKSIENGTITDPMGELIDFQL
GADGRFDPADYTLTANDGSSLVNNVPTGGPQNDGGLLKNAKVFYDTTEKR
TRVTGLYLGTGEKVTLTYNVRLNDQFVSNKFYDTNGRTTLHPKEVEKNTV
RDFPIPKIRDVRKYPEITIPKEKKLGEIEFIKINKNDKKPLRDAVFSLQK
QHPDYPDIYGAIDQNGTYQNVRTGEDGKLTFKNLSDGKYRLFENSEPAGY
KPVQNKPIVAFQIVNGEVRDVTSIVPQDIPAGYEFTNDKHYITNEPIPPK
REYPRTGGIGMLPFYLIGCMMMGGVLLYTRKHP

[1210] ORF4_{—}6BSP is a cell wall surface protein. An example of an amino acid sequence of ORF4_{—}6BSP is set forth in SEQ ID NO: 203.

SEQ ID NO: 203

MKSINKFLTMLAALLLTASSLFSAATVFAADNVSTAPDAVTKTLTIHKLL
LSEDDLKTWDTNGPKGYDGTQSSLKDLTGVVAEEIPNVYFELQKYNLTDG
KEKENLKDDSKWTTVHGGLTTKDGLKIETSTLKGVYRTREDRTKTTYVGP
NGQVLTGSKAVPALVTLPLVNNNGTVTDAHVFPKNSYNKPVVDKRIADTL
NYNDQNGLSIGTKIPYVVNTTIPSNATFATSFWSDEMTEGLTYNEDVTIT
LNNVAMDQADYEVTKGNNGFNLKLTEAGLAKINGKDADQKIQITYSATLN
SLAVADIPESNDTTYHYGNHQDHGNTPKPTKPNNGQITVTKTWDSQPAPE
GVKATVQLVNAKTGEKVGAPVELSENNWTYTWSGLDNSIEYKVEEEYNGY
SAEYTVESKGKLGVKNWKDNNPAPINPEEPRVKTYGKKFVKVDQKDTRLE
NAQFVVKKADSNKYIAFKSTAQQAADEKAAATAKQKLDAAVAAYTNAADK
QAAQALVDQAQQEYNVAYKEAKPGYVEVAGKDEAMVLTSNTDGQEQISGL
AAGTYKLEEIKAPEGFAKIDDVEFVVGAGSWNQGEFNYLKDVQKNDATKV
VNKKITIPQTGGIGTIIFAVAGAAIMGIAVYAYVKNNKDEDQLA

[1211] ORF5_{—}6BSP is a cell wall surface protein. An example of an amino acid sequence of ORF5_{—}6BSP is set forth in SEQ ID NO: 204.

SEQ ID NO: 204

MTMQKMQKMISRIFFVMALCFSLVWGAHAVQAQEDHTLVLQLENYQEVVS
QLPSRDGHRLQVWKLDDSYSYDDRVQIVRDLHSWDENKLSSFKKTSFEMT
FLENQIEVSHIPNGLYYVRSIIQTDAVSYPAEFLFEMTDQTVEPLVIVAK
KTDTMTTKVKLIKVDQDHNRLEGVGFKLVSVARDGSEKEVPLIGEYRYSS
SGQVGRTLYTDKNGEIFVTNLPLGNYRFKEVEPLAGYAVTTLDTDVQLVD
HQLVTITVVNQKLPRGNVDFMKVDGRTNTSLQGAMFKVMKEESGHYTPVL
QNGKEVVVTSGKDGRFRVEGLEYGTYYLWELQAPTGYVQLTSPVSFTIGK
DTRKELVTVVKNNKRPRIDVPDTGEETLYILMLVAILLFGSGYYLTKKPN
N

[1212] ORF6_{—}6BSP is a putative sortase. An example of an amino acid sequence of ORF6_{—}6BSP is set forth in SEQ ID NO: 205.

SEQ ID NO: 205

MLIKMVKTKKQKRNNLLLGVVFFIGMAVMAYPLVSRLYYRVESNQQIADF
DKEKATLDEADIDERMKLAQAFNDSLNNVVSGDPWSEEMKKKGRAEYARM
LEIHERMGHVETPVIDVDLPVYAGTAEEVLQQGAGHLEGTSLPIGGNSTH
AVITAHTGLPTAKMFTDLTKLKVGDKFYVHNIKEVMAYQVDQVKVIEPTN
FDDLLIVPGHDYVTLLTCTPYMINTHRLLVRGHRIPYVAEVEEEFTAANK
LSHLYRYLFYVAVGLIVILLWIIRRLRKKKKQPEKALKALKAARKEVKVE
DGQQ

[1213] ORF7_{—}6BSP is a putative sortase. An example of an amino acid sequence of ORF7_{—}6BSP is set forth in SEQ ID NO: 206.

SEQ ID NO: 206

MDNSRRSRKKGTKKKKHPLILLLIFLVGFAVAIYPLVSRYYYRIESNEVI
KEFDETVSQMDKAELEERWRLAQAFNATLKPSEILDPFTEQEKKKGVSEY
ANMLKVHERIGYVEIPAIDQEIPMYVGTSEEILQKGAGLLEGASLPVGGE
NTHTVVTAHRGLPTAELFSQLDKMKKGDVFYLHVLDQVLAYQVDQILTVE
PNDFEPVLIQHGEDYATLLTCTPYMINSHRLLVRGKRIPYTAPIAERNRA
VRERGQFWLWLLLAALVMILVLSYGVYRHRRIVKGLEKQLEEHHVKG

[1214] ORF8_{—}6BSP is a putative sortase. An example of an amino acid sequence of ORF8_{—}6BSP is set forth in SEQ ID NO: 207.

SEQ ID NO: 207

MSKAKLQKLLGYLLMLVALVIPVYCFGQMVLQSLGQVKGHEIFSESVTAD
SYQEQLQRSLDYNQRLDSQNRIVDPFLAEGYEVNYQVSDDPDAVYGYLSI
PSLETMEPVYLGADYHHLAMGLAHVDGTPLPVEGKGIRSVIAGHRAEPSH
VFFRHLDQLKVGDALYYDNGQEIVEYQMMDTEIILPSEWEKLESVSSKNI
MTLITCDPTPTFNKRLLVNFERVAVYQKSDPQTAAVARVAFTKEGQSVSR
VATSQWLYRGLVVLAFLGILFVLWKLARLLRGK

[1215] As discussed above, a S. pneumoniae AI sequence is present in the 9V Spain 3 S. pneumoniae genome. Examples of S. pneumoniae AI sequences from 9V Spain 3 are set forth below.

[1216] ORF2_{—}9VSP is a transcriptional regulator. An example of an amino acid sequence of ORF2_{—}9VSP is set forth in SEQ ID NO: 208.

SEQ ID NO: 208

MLNKYIEKRITDKITILNILLDIRSIELDELSTLTSLQSKSLLSILQELQ
ETFEEELTFNLDTQQVQLIEHHSHQTNYYFHQLYNQSTILKILREELLQG
NQSFNEFTQKEYISIATGYRVRQKCGLLLRSVGLDLVKNQVVGPEYRIRF
LIALLQFHFGIEIYDLNDGSMDWVTHMTVQSNSQLSHELLEITPDEYVHF
SILVALTWKRREFPLEFPESKEFEKLKNLFMYPILMEHCQTYLEPHANMT
FTQEELDYIFLVYCSANSSFSKDKWNQEKKTHTIQLILQHTRGKHLLSKF
KNILGNDISNSLSFLTALTFLTRTFLFGLQNLVPYYNYYEHYGIESDKPL
YHISKAIVQEWMTEQKIEGVIDQHRLYLFSLYLTETIFSSLPAIPIFIIL
NNQADVNLIKSIILRNFTDKVASVTGYNILILSPPPSEEHLTEPLIITTK
EYLPYVKKQYPKGKHHFLTTALDLHVSQQRLIYQTIVDIRKEAFDKRVAM
IAKKAHYLL

[1217] ORF3_{—}9VSP is a cell wall surface protein. An example of an amino acid sequence of ORF3_{—}9VSP is set forth in SEQ ID NO: 209.

SEQ ID NO: 209

MKKVRKIFQKAVAGLCCISQLTAFSSIVALAETPETSPAIGKVVIKETGE
GGALLGDAVFELKNNTNGTTVSQRTEAQTGEAIFSNIKPGTYTLTEAQPP
VGYKPSTKQRTVEVEKNGRTTVQGEQVENREEALSDQYPQTGTYPDVQTP
YQIIKVDGSEKNGQHKALNPNPYERVIPEGTLSKRIYQVNNLDDNQYGIE
LTVSGKTVYERKDKSVPLDVVILLDNSNSMSNIRNKNARRAERAGEATRS
LIDKITSDPENRVALVTYASTIFDGTEFTVEKGVADKNGKRLNDSLFWNY
DQTSFTTNTKDYSYLKLTNDKNDIVELKNKVPTEAEDHDGNRLMYQFGAT
FTQKALMKADEILTQQARQNSQKVIFHITDGVPTMSYPINFNHATFAPSY
QNQLNAFFSKSPNKDGILLSDFITQATSGEHTIVRGDGQSYQMFTDKTVY
EKGAPAAFPVKPEKYSEMKAVGYAVIGDPINGGYIWLNWRESILAYPFNS
NTAKITNHGDPTRWYYNGNIAPDGYDVFTVGIGINGDPGTDEATATSFMQ
SISSKPENYTNVTDTTKILEQLNRYFHTIVTEKKSIENGTITDPMGELID
LQLGTDGRFDPADYTLTANDGSRLENGQAVGGPQNDGGLLKNAKVFYDTT
EKRIRVTGLYLGTGEKVTLTYNVRLNDQFVSNKFYDTNGRTTLHPKEVEK
NTVRDFPIPKIRDVRKYPAITIAKEKKLGEIEFIKINKNDKKPLRDAVFS
LQKQHPDYPDIYGAIDQNGTYQNVRTGEDGKLTFKNLSDGKYRLFENSEP
AGYKPVQNKPIVAFQIVNGEVRDVISTVPQDIPAGYEFTNDKHYITNEPI
PPKREYPRTGGIGMLLFYLIGCMMMGGVLLYTRKHP

[1218] ORF4_{—}9VSP is a cell wall surface protein. An example of an amino acid sequence of ORF4_{—}9VSP is set forth in SEQ ID NO: 210.

SEQ ID NO: 210

MKSINKFLTMLAALLLTASSLFSAATVFAAGTTTTSVTVHKLLATDGDMD
KIANELETGNYAGNKVGVLPANAKEIAGVMFVWTNTNNEIIDENGQTLGV
NIDPQTFKLSGAMPATAMKKLTEAEGAKFNTANLPAAKYKIYEIHSLSTY
VGEDGATLTGSKAVPIEIELPLNDVVDAHVYPKNTEAKPKIDKDFKGKAN
PDTPRVDKDTPVNHQVGDVVEYEIVTKIPALANYATANWSDRMTEGLAFN
KGTVKVTVDDVALEAGDYALTEVATGFDLKLTDAGLAKVNDQNAEKTVKI
TYSATLNDKAIVEVPESNDVTFNYGNNPDHGNTPKPNKPNENGDLTLTKT
WVDATGAPIPAGAEATFDLVNAQTGDVVQTVTLTTDKNTVTVNGLDKNTE
YKFVERSIKGYSADYQEITTAGEIAVKNWKDENPKPLDPTEPKVVTYGKK
FVKVNDKDNRLAGAEFVIANADNAGQYLARKADKVSQEEKQLVVTTKDAL
DRAVAAYNALTAQQQTQQEKEKVDKAQAAYNAAVTAANNAFEWVADKDNE
NVVKLVSDAQGRFEITGLLAGTYYLEETKQPAGYALLTSRQKFEVTATSY
SATGQGIEYTAGSGKDDATKVVNKKITIPQTGGIGTIIFAVAGAVIMGIA
VYAYVKNNKDEDQLA

[1219] ORF5_{—}9VSP is a cell wall surface protein. An example of an amino acid sequence of ORF5_{—}9VSP is set forth in SEQ ID NO: 211.

SEQ ID NO: 211

MTMQKMQKMQKMQKMQKMQKMISRIFFVMALCFSLVWGAHAVQAQEDHTL
VLQLENYQEVVSQLPSRDGHRLQVWKLDDSYSYDNRVQTVRDLHSWDENK
LSSFKKTSFEMTFLENQIEVSHIPNGLYYVRSIIQTDAVSYPAEFLFEMT
DQTVEPLVIVAKKADTVTTKVKLIKVDQDHNRLEGVGFKLVSVARDGSEK
EVPLIGEYRYSSSGQVGRTLYTDKNGEIVVTNLPLGTYRFKEVEPLAGYT
VTTMDTDVQLVDHQLVTITVVNQKLPRGNVDFMKVDGRTNTSLQGAMFKV
MKEENGHYTPVLQNGKEVVVASGKDGRFRVEGLEYGTYYLWELQAPTGYV
QLTSPVSFTIGKDTRKELVTVVKNNKRPRIDVPDTGEETLYILMLVAILL
FGSGYYLTKKTNN

[1220] ORF6_{—}9VSP is a putative sortase. An example of an amino acid sequence of ORF6_{—}9VSP is set forth in SEQ ID NO: 212.

SEQ ID NO: 212

MLIKMAKTKKQKRNNLLLGVVFFIGIAVMAYPLVSRLYYRVESNQQIADF
DKEKATLDEADIDERMKLAQAFNDSLNNVVSGDPWSEEMKKKGRAEYARM
LEIHERMGHVEIPAIDVDLPVYAGTAEEVLQQGAGHLEGTSLPIGGNSTH
AVITAHTGLPTAKMFTDLTKLKVGDKFYVHNIKEVMAYQVDQVKVIEPTN
FDDLLIVPGHDYVTLLTCTPYMINTHRLLVRGHRIPYVAEVEEEFIAANK
LSHLYRYLFYVAVGLIVILLWIIRRLRKKKRQSERALKALKEATKEVKVE
DE

[1221] ORF7_{—}9VSP is a putative sortase. An example of an amino acid sequence of ORF7_{—}9VSP is set forth in SEQ ID NO: 213.

SEQ ID NO: 213

MSKSRYSRKKSVKKKKNPFILLLIFLVGLAVANYPLVSRYYYRIESNEVI
KEFDETVSQMDKAELEERWRLAQAFNATLKPSEILDPFTEQEKKKGVSEY
ANMLKVHERTGYVEIPAIDQEIPMYVGTSEEILQKGAGLLEGASLPVGGE
NTHTVVTAHRGLPTAELFSQLDKMKKGDIEYLHVLDQVLAYQVDQIVTVE
PNDFEPVLIQHGEDYATLLTCTPYMINSHRLLVRGKRIPYTAPIAERNRA
VRERGQFWLWLLLGAMAVILLLLYRVYRNRRIVKGLEKQLEGRHVKD

[1222] ORF8_{—}9VSP is a putative sortase. An example of an amino acid sequence of ORF8_{—}9VSP is set forth in SEQ ID NO: 214.

SEQ ID NO: 214

MSRTKLRALLGYLLMLVACLIPIYGFGQMVLQSLGQVKGHATFVKSMTTE
MYQEQQNHSLAYNQRLASQNRIVDPELAEGYEVNYQVSDDPDAVYGYLSI
PSLEIMEPVYLGADYHHLGMGLAHVDGTPLPLDGTGIRSVIAGHPAEPSH
VFTRHLDQLKVGDALYYDNGQEIVEYQMMDTEIILPSEWEKLESVSSKNI
MTLITCDPIPTFNKRLLVNEERVAVYQKSDPQTAAVARVAFTKEGQSVSR
VATSQWLYRGLVVLAFLGILFVLWKLARLLRGK

[1223] As discussed above, a S. pneumoniae AI sequence is present in the 14 CSR 10 S. pneumoniae genome. Examples of S. pneumoniae AI sequences from 14 CSR 10 are set forth below.

[1224] ORF2_{—}14CSR is a transcriptional regulator. An example of an amino acid sequence of ORF2_{—}14CSR is set forth in SEQ ID NO: 215.

SEQ ID NO: 215

MLNKYIEKRITDKITILNILLDIRSIELDELSTLTSLQSKSLLSILQELQ
ETFEEELTFNLDTQQVQLIEHHSHQTNYYFHQLYNQSTILKTLRFFLLQG
NQSFNEFTQKEYISIATGYRVRQKCGLLLRSVGLDLVKNQVVGPEYRIRF
LIALLQFHFGIEIYDLNDGSMDWVTHMIVQSNSQLSHELLEITPDEYVHF
SILVALTWKRREFPLEFPESKEFEKLKNLFMYPILMEHCQTYLEPHANMT
FTQEELDYIFLVYCSANSSFSKDKWNQEKKTHTTQLILQHTRGKHLLSKF
KNILGNDISNSLSFLTALTFLTRTFLFGLQNLVPYYNYYEHYGIESDKPL
YHTSKATVQEWMTEQKIEGVTDQHRLYLFSLYLTETIFSSLPAIPIFIIL
NNQADVNLIKSIILRNFTDKVASVTGYNILISPPPSEEHLTEPLIIITTK
EYLPYVKKQYPKGKHHFLTIALDLHVSQQRLIYQTIVDIRKEAFDKRVAM
IAKKAHYLL

[1225] ORF3_{—}14CSR is a cell wall surface protein. An example of an amino acid sequence of ORF3_{—}14CSR is set forth in SEQ ID NO: 216.

SEQ ID NO: 216

MKKVRKIFQKAVAGLCCISQLTAFSSIVALAETPETSPAIGKVVIKETGE
GGALLGDAVFELKNNTDGTTVSQRTEAQTGEAIFSNIKPGTYTLTEAQPP
VGYKPSTKQWTVEVEKNGRTTVQGEQVENREEALSDQYPQTGTYPDVQTP
YQIIKVDGSEKNGQHKALNPNPYERVIPEGTLSKRIYQVNNLDDNQYGIE
LTVSGKTTVETKEASTPLDVVTLLDNSNSMSNIRHNHAHRAEKAGEATRA
LVDKITSNPDNRVALVTYGSTIFDGSEATVEKGVADANGKILNDSALWTF
DRTTFTAKTYNYSFLNLTSDPTDIQTIKDRIPSDAEELNKDKLMYQFGAT
FTQKALMTADDILTKQARPNSKKVIFHITDGVPTMSYPINFKYTGTTQSY
RTQLNNFKAKTPNSSGILLEDFVTWSADGEHKIVRGDGESYQMFTKKPVT
DQYGVHQILSITSMEQRAKLVSAGYRFYGTDLYLYWRDSILAYPFNSSTD
WITNHGDPTTWYYNGNMAQDGYDVFTVGVGVNGDPGTDEARARTFMQSIS
SSPDNYTNVADPSQILQELNRYFYTIVNEKKSIENGTITDPMGELIDFQL
GADGRFDPADYTLTANDGSSLVNNVPTGGPQNDGGLLKNAKVFYDTTEKR
IRVTGLYLGTGEKVTLTYNVRLNDQFVSNKFYDTNGRTTLHPKEVEKNTV
RDFPIPKIRDVRKYPEITIPKEKKLGEIEFIKINKNDKKPLRDAVPSLQK
QHPDYPDIYGAIDQNGTYQNVRTGEDGKLTEKNLSDGKYRLFENSEPAGY
KPVQNKPIVAFQIVNGEVRDVTSIVPQDIPAGYEFTNDKHYITNEPTPPK
REYPRTGGIGMLPFYLTGCMMMGGVLLYTRKHP

[1226] ORF4_{—}14CSR is a cell wall surface protein. An example of an amino acid sequence of ORF4_{—}14CSR is set forth in SEQ ID NO: 217.

SEQ ID NO: 217

MKSINKFLTMLAALLLTASSLFSAATVFAADNVSTAPDAVTKTLTIHKLL
LSEDDLKTWDTNGPKGYDGTQSSLKDLTGVVAEEIPNVYFELQKYNLTDG
KEKENLKDDSKWTTVHGGLTTKDGLKIETSTLKGVYRIREDRTKTTYVGP
NGQVLTGSKAVPALVTLPLVNNNGTVIDAHVFPKNSYNKPVVDKRTADTL
NYNDQNGLSIGTKIPYVVNTTIPSNATFATSFWSDEMTEGLTYNEDVTIT
LNNVAMDQADYEVTKGNNGFNLKLTEAGLAKINGKDADQKIQITYSATLN
SLAVADIPESNDITYHYGNHQDHGNTPKPTKPNNGQITVTKTWDSQPAPE
GVKATVQLVNAKTGEKVGAPVELSENNWTYTWSGLDNSIEYKVEEEYNGY
SAEYTVESKGKLGVKNWKDNNPAPINPEEPRVKTYGKKFVKVDQKDTRLE
NAQFVVKKADSNKYIAFKSTAQQAADEKAAATAKQKLDAAVAAYTNAADK
QAAQALVDQAQQEYNVAYKEAKFGYVEVAGKDEAMVLTSNTDGQFQISGL
AAGTYKLEEIKAPEGFAKIDDVEFVVGAGSWNQGEFNYLKDVQKNDATKV
VNKKITIPQTGGIGTIIFAVAGAAIMGIAVYAYVKNNKDEDQLA

[1227] ORF5_{—}14CSR is a cell wall surface protein. An example of an amino acid sequence of ORF5_{—}14CSR is set forth in SEQ ID NO: 218.

SEQ ID NO: 218

MTMQKMQKMISRIFFVMALCFSLVWGAHAVQAQEDHTLVLQLENYQEVVS
QLPSRDGHRLQVWKLDDSYSYDDRVQIVRDLHSWDENKLSSFKKTSFEMT
FLENQIEVSHIPNGLYYVRSIIQTDAVSYPAEFLFEMTDQTVEPLVIVAK
KTDTMTTKVKLIKVDQDHNRLEGVGFKLVSVARDGSEKEVPLIGEYRYSS
SGQVGRTLYTDKNGETFVTNLPLGNYRFKEVEPLAGYAVTTLDTDVQLVD
HQLVTITVVNQKLPRGNVDFMKVDGRTNTSLQGAMFKVMKEESGHYTPVL
QNGKEVVVTSGKDGRFRVEGLEYGTYYLWELQAPTGYVQLTSPVSFTIGK
DTRKELVTVVKNNKRPRIDVPDTGEETLYILMLVAILLFGSGYYLTKKPN
N

[1228] ORF6_{—}14CSR is a putative sortase. An example of an amino acid sequence of ORF6_{—}14CSR is set forth in SEQ ID NO: 219.

SEQ ID NO: 219

MLIKMVKTKKQKRNNLLLGVVFFIGMAVMAYPLVSRLYYRVESNQQIADF
DKEKATLDEADIDERMKLAQAFNDSLNNVVSGDPWSEEMKKKGRAEYARM
LEIHERMGHVEIPVIDVDLPVYAGTAEEVLQQGAGHLEGTSLPIGGNSTH
AVITAHTGLPTAKMFTDLTKLKVGDKFYVHNIKEVMAYQVDQVKVIEPTN
FDDLLIVPGHDYVTLLTCTPYMINTHRLLVRGHRIPYVAEVEEEFIAANK
LSHLYRYLFYVAVGLIVILLWIIRRLRKKKKQPEKALKALKAARKEVKVE
DGQQ

[1229] ORF7_{—}14CSR is a putative sortase. An example of an amino acid sequence of ORF7_{—}14CSR is set forth in SEQ ID NO: 220.

SEQ ID NO: 220

MDNSRRSRKKGTKKKKHPLILLLIFLVGFAVAIYPLVSRYYYRIESNEVI
KEFDETVSQMDKAELEERWRLAQAFNATLKPSEILDPFTEQEKKKGVSEY
ANMLKVHERIGYVEIPAIDQEIPMYVGTSEEILQKGAGLLEGASLPVGGE
NTHTVVTAHRGLPTAELFSQLDKMKKGDVFYLHVLDQVLAYQVDQILTVE
PNDFEPVLIQHGEDYATLLTCTPYMINSHRLLVRGKRIPYTAPIAERNRA
VRERGQEWLWLLLAALVMILVLSYGVYRHRRIVKGLEKQLEEHHVKG

[1230] ORF8_{—}14CSR is a putative sortase. An example of an amino acid sequence of ORF8_{—}14CSR is set forth in SEQ ID NO: 221.

SEQ ID NO: 221

MSKAKLQKLLGYLLMLVALVIPVYCFGQMVLQSLGQVKGHEIFSESVTAD
SYQEQLQRSLDYNQRLDSQNRIVDPFLAEGYEVNYQVSDDPDAVYGYLSI
PSLEIMEPVYLGADYHHLAMGLAHVDGTPLPVEGKGIRSVIAGHPAEPSH
VFFRHLDQLKVGDALYYDNGQEIVEYQMMDTEIILPSEWEKLESVSSKNI
MTLITCDPIPTPNKRLLVNFERVAVYQKSDPQTAAVARVAFTKEGQSVSR
VATSQWLYRGLVVLAFLGTLFVLWKLARLLRGK

[1231] As discussed above, a S. pneumoniae AI sequence is present in the 19F Taiwan 14 S. pneumoniae genome. Examples of S. pneumoniae AI sequences from 19F Taiwan 14 are set forth below.

[1232] ORF2_{—}19FTW is a transcriptional regulator. An example of an amino acid sequence of ORF2_{—}19FTW is set forth in SEQ ID NO: 222.

SEQ ID NO: 222

MLNKYIEKRITDKITILNILLDIRSTELDELSTLTSLQSKSLLSILQELQ
ETFEEELTFNLDTQQVQLIEHHSHQTNYYFHQLYNQSTILKTLRFFLLQG
NQSENEFTQKEYISIATGYRVRQKCGLLLRSVGLDLVKNQVVGPEYRIRF
LTALLQFHFGTEIYDLNDGSMDWVTHMIVQSNSQLSHELLEITPDEYVHE
STLVALTWKRREFPLEFPESKEFEKLKNLFMYPILMEHCQTYLEPHANMT
FTQEELDYIFLVYCSANSSFSKDKWNQEKKTHTIQLILQHTRGKHLLSKF
KNILGNDISNSLSFLTALTFLTRTFLFGLQNLVPYYNYYEHYGIESDKPL
YHISKAIVQEWMTEQKIEGVIDQHRLYLFSLYLTETIFSSLPAIPIFIIL
NNQADVNLIKSIILRNFTDKVASVTGYNILTSPPPSEEHLTEPLIIITTK
EYLPYVKKQYPKGKHHFLTIALDLHVSQQRLIYQTIVDIRKEAFDKRVAM
IAKKAHYLL

[1233] ORF3_{—}19FTW is a cell wall surface protein. An example of an amino acid sequence of ORF3_{—}19FTW is set forth in SEQ ID NO: 223.

SEQ ID NO: 223

MKKVRKIFQKAVAGLCCISQLTAFSSIVALAETPETSPAIGKVVIKETGE
GGALLGDAVFELKNNTDGTTVSQRTEAQTGEAIESNIKPGTYTLTEAQPP
VGYKPSTKQWTVEVEKNGRTTVQGEQVENREEALSDQYPQTGTYPDVQTP
YQIIKVDGSEKNGQHKALNPNPYERVTPEGTLSKRIYQVNNLDDNQYGIE
LTVSGKTVYERKDKSVPLDVVILLDNSNSMSNIRNKNARRAERAGEATRS
LIDKITSDPENRVALVTYASTIPDGTEFTVEKGVADKNGKRLNDSLFWNY
DQTSFTTNTKDYSYLKLTNDKNDIVELKNKVPTEAEDHDGNRLMYQFGAT
FTQKALMKADEILTQQARQNSQKVIFHITDGVPTMSYPINFNHATFAPSY
QNQLNAFFSKSPNKDGILLSDFITQATSGEHTIVRGDGQSYQMFTDKTVY
EKGAPAAFPVKPEKYSEMKAVGYAVIGDPINGGYIWLNWRESILAYPFNS
NTAKITNHGAPTRWYYNGNIAPDGYDVFTVGIGINGDPGTDEATATSFMQ
SISSKPENYTNVTDTTKILEQLNRYFHTIVTEKKSIENGTITDPMGELID
LQLGTDGRFDPADYTLTANDGSRLENGQAVGGPQNDGGLLKNAKVFYDTT
EKRIRVTGLYLGTGEKVTLTYNVRLNDQEVSNKFYDTNGRTTLHPKEVEK
NTVRDFPIPKIRDVRKYPAITIAKEKKLGEIEFIKINKNDKKPLRDAVFS
LQKQHPDYPDIYGAIDQNGTYQNVRTGEDGKLTFKNLSDGKYRLFENSEP
AGYKPVQNKPIVAFQIVNGEVRDVTSIVPQDIPAGYEFTNDKHYITNEPI
PPKREYPRTGGIGMLPFYLIGCMMMGGVLLYTRKHP

[1234] ORF4_{—}19FTW is a cell wall surface protein. An example of an amino acid sequence of ORF4_{—}19FTW is set forth in SEQ ID NO: 224.

SEQ ID NO: 224

MKSINKFLTMLAALLLTASSLFSAATVFAAGTTTTSVTVHKLLATDGDMD
KIANELETGNYAGNKVGVLPANAKEIAGVMFVWTNTNNEIIDENGQTLGV
NIDPQTFKLSGAMPATAMKKLTEAEGAKFNTANLPAAKYKIYEIHSLSTY
VGEDGATLTGSKAVPIEIELPLNDVVDAHVYPKNTEAKPKIDKDFKGKAN
PDTPRVDKDTPVNHQVGDVVEYEIVTKIPALANYATANWSDRMTEGLAFN
KGTVKVTVDDVALEAGDYALTEVATGFDLKLTDAGLAKVNDQNAEKTVKI
TYSATLNDKAIVEVPESNDVTFNYGNNPDHGNTPKPNKPNENGDLTLTKT
WVDATGAPIPAGAEATFDLVNAQTGKVVQTVTLTTDKNTVTVNGLDKNTE
YKFVERSIKGYSADYQEITTAGEIAVKNWKDENPKPLDPTEPKVVTYGKK
FVKVNDKDNRLAGAEFVTANADNAGQYLARKADKVSQEEKQLVVTTKDAL
DRAVAAYNALTAQQQTQQEKEKVDKAQAAYNAAVIAANNAFEWVADKDNE
NVVKLVSDAQGRFEITGLLAGTYYLEETKQPAGYALLTSRQKFEVTATSY
SATGQGIEYTAGSGKDDATKVVNKKITIPQTGGIGTIIFAVAGAVIMGIA
VYAYVKNNKDEDQLA

[1235] ORF5_{—}19FTW is a cell wall surface protein. An example of an amino acid sequence of ORF5_{—}19FTW is set forth in SEQ ID NO: 225.

SEQ ID NO: 225

MTMQKMQKMTSRIFFVMALCFSLVWGAHAVQAQEDHTLVLQLENYQEVVS
QLPSRDGHRLQVWKLDDSYSYDNRVQIVRDLHSWDENKLSSFKKTSFEMT
FLENQIEVSHIPNGLYYVRSIIQTDAVSYPAEFLFEMTDQTVEPLVIVAK
KADTVTTKVKLIKVDQDHNRLEGVGFKLVSVARDGSEKEVPLIGEYRYSS
SGQVGRTLYTDKNGEIVVTNLPLGTYRFKEVEPLAGYTVTTMDTDVQLVD
HQLVTITVVNQKLPRGNVDFMKVDGRTNTSLQGAMFKVMKEENGHYTPVL
QNGKEVVVASGKDGRFRVEGLEYGTYYLWELQAPTGYVQLTSPVSFTIGK
DTRKELVTVVKNNKRPRIDVPDTGEETLYILMLVAILLFGSGYYLTKKTN
N

[1236] ORF6_{—}19FTW is a putative sortase. An example of an amino acid sequence of ORF6_{—}19FTW is set forth in SEQ ID NO: 226.

SEQ ID NO: 226

MLIKMAKTKKQKRNNLLLGVVFFIGMAVMAYPLVSRLYYRVESNQQIADF
DKEKATLDEADTDERMKLAQAFNDSLNNVVSGDPWSEEMKKKGRAEYARM
LEIHERMGHVEIPAIDVDLPVYAGTAEEVLQQGAGHLEGTSLPIGGNSTH
AVITAHTGLPTAKMFTDLTKLKVGDKFYVHNIKEVMAYQVDQVKVIEPTN
FDDLLIVPGHDYVTLLTCTPYMINTHRLLVRGHRIPYVAEVEEEFIAANK
LSHLYRYLFYVAVGLIVILLWIIRRLRKKKRQSERALKALKEATKEVKVE
DE

[1237] ORF7_{—}19FTW is a putative sortase. An example of an amino acid sequence of ORF7_{—}19FTW is set forth in SEQ ID NO: 227.

SEQ ID NO: 227

MSKSRYSRKKSVKKKKNPFILLLIFLVGLAVAMYPLVSRYYYRIESNEVT
KEFDETVSQMDKAELEERWRLAQAFNATLKPSEILDPFTDQEKKQGVSEY
ANMLKVHERIGYVEIPAIEQEIPMYVGTSEDILQKGAGLLEGASLPVGGE
NTHTVITAHRGLPTAELFSQLDKMKKGDIFYLHVLDQVLAYQVDQIVTVE
PNDFEPVLIQHGQDYATLLTCTPYMLNSHRLLVRGKRTPYTAPIAERNRA
VRERGQFWLWLLLGAMAVILLLLYRVYRNRRTVKGLEKQLEGRHVKD

[1238] ORF8_{—}19FTW is a putative sortase. An example of an amino acid sequence of ORF8_{—}19FTW is set forth in SEQ ID NO: 228.

SEQ ID NO: 228

MSRTKLRALLGYLLMLVACLIPIYCFGQMVLQSLGQVKGHATFVKSMTTE
MYQEQQNHSLAYNQRLASQNRIVDPFLAEGYEVNYQVSDDPDAVYGYLSI
PSLEIMEPVYLGADYHHLGMGLAHVDGTPLPLDGTGIRSVIAGHRAEPSH
VFFRHLDQLKVGDALYYDNGQEIVEYQMMDTEIILPSEWEKLESVSSKNI
MTLITCDPIPTFNKRLLVNFERVAVYQKSDPQTAAVARVAFTKEGQSVSR
VATSQWLYRGLVVLAFLGILFVLWKLARLLRGK

[1239] As discussed above, a S. pneumoniae AI sequence is present in the 23F Taiwan 15 S. pneumoniae genome. Examples of S. pneumoniae AI sequences from 23F Taiwan 15 are set forth below.

[1240] ORF2_{—}23FTW is a transcriptional regulator. An example of an amino acid sequence of ORF2_{—}23FTW is set forth in SEQ ID NO: 229.

SEQ ID NO: 229

MLNKYIEKRITDKITILNILLDIRSIELDELSTLTSLQSKSLLSILQELQ
ETFEEELTPNLDTQQVQLIEHHSHQTNYYFHQLYNQSTILKILRFFLLQG
NQSFNEFTQKEYISIATGYRVRQKCGLLLRSVGLDLVKNQVVGPEYRIRF
LIALLQFHFGIEIYDLNDGSMDWVTHMIVQSNSQLSHELLETTPDEYVHF
SILVALTWKRREFPLEFPESKEFEKLKNLFMYPILMEHCQTYLEPHANMT
FTQEELDYIFLVYCSANSSFSKDKWNQEKKTHTIQLILQHTRGKHLLSKF
KNILGNDISNSLSFLTALTFLTRTFLFGLQNLVPYYNYYEHYGIESDKPL
YHISKAIVQEWMTEQKIEGVIDQHRLYLFSLYLTETIFSSLPAIPIFIIL
NNQADVNLIKSIILRNFTDKVASVTGYNILISPPPSEEHLTEPLITITTK
EYLPYVKKQYPKGKHHFLTIALDLHVSQQRLIYQTIVDIRKEAFDKRVAM
IAKKAHYLL

[1241] ORF3_{—}23FTW is a cell wall surface protein. An example of an amino acid sequence of ORF3_{—}23FTW is set forth in SEQ ID NO: 230.

SEQ ID NO: 230

MKKVRKIFQKAVAGLCCISQLTAFSSIVALAETPETSPAIGKVVIKETGE
GGALLGDAVFELKNNTDGTTVSQRTEAQTGEAIFSNIKPGTYTLTEAQPP
VGYKPSTKQWTVEVEKNGRTTVQGEQVENREEALSDQYPQTGTYPDVQTP
YQIIKVDGSEKNGQHKALNPNPYERVIPEGTLSKRIYQVNNLDDNQYGIE
LTVSGKTVYEQKDKSVPLDVVILLDNSNSMSNIRNKNARRAERAGEATRS
LIDKITSDPENRVALVTYASTIFDGTEFTVEKGVADKNGKRLNDSLFWNY
DQTSFTTNTKDYSYLKLTNDKNDIVELKNKVPTFAEDHDGNRLMYQFGAT
FTQKALMKADEILTQQARQNSQKVIFHITDGVPTMSYPINFNHATFAPSY
QNQLNAETSKSPNKDGILLSDFITQATSGEHTIVRGDGQSYQMFTDKTVY
EKGAPAAFPVKPEKYSEMKAAGYAVIGDPINGGYIWLNWRESILAYPFNS
NTAKITNHGDPTRWYYNGNIAPDGYDVFTVGIGINGDPGTDEATATSFMQ
SISSKPENYTNVTDTTKILEQLNRYFHTIVTEKKSIENGTITDPMGELID
LWLGTDGRFDPADYTLTANDGSRLENGQAVGGPQNDGGLLKNAKVLYDTT
EKRIRVTGLYLGTKEKVTLTYNVRLNDEFVSNKFYDTNGRTTLHPKEVEQ
NTVRDFPIPKIRDVRKYPEITISKEKKLGDIEFIKVNKNDKKPLRDAVFS
LQKQHPDYPDIYGAIDQNGTYQNVRTGEDGKLTFKNLSDGKYRLFENSEP
AGYKPVQNKPIVAFQIVNGEVRDVTSIVPQDIPAGYEFTNDKHYITNEPI
PPKREYPRTGGIGMLPFYLIGCMMMGGVLLYTRKHP

[1242] ORF4_{—}23FTW is a cell wall surface protein. An example of an amino acid sequence of ORF4_{—}23FTW is set forth in SEQ ID NO: 231.

SEQ ID NO: 231

MKSINKFLTILAALLLTVSSLFSAATVFAAEQKTKTLTVHKLLMTDQELD
AWNSDAITTAGYDGSQNFEQFKQLQGVPQGVTEISGVAFELQSYTGPQGK
EQENLTNDAVWTAVNKGVTTETGVKFDTEVLQGTYRLVEVRKESTYVGPN
GKVLTGMKAVPALITLPLVNQNGVVENAHVYPKNSEDKPTATKTFDTAAG
FVDPGEKGLAIGTKVPYIVTTTIPKNSTLATAPWSDEMTEGLDYNGDVVV
NYNGQPLDNSHYTLEAGHNGFILKLNEKGLEAINGKDAEATITLKYTATL
NALAVADVPEANDVTFHYGNNPGHGNTPKPNKPKNGELTITKTWADAKDA
PIAGVEVTFDLVNAQTGEVVKVPGHETGIVLNQTNNWTFTATGLDNNTEY
KFVERTIKGYSADYQTITETGKIAVKNWKDENPEPINPEEPRVKTYGKKF
VKVDQKDERLKEAQFVVKNEQGKYLALKSAAQQAVNEKAAAEAKQALDAA
IAAYTNAADKNAAQAVVDAAQKTYNDNYRAARFGYVEVERKEDALVLTSN
TDGQFQISGLAAGSYTLEETKAPEGFAKLGDVKFEVGAGSWNQGDFNYLK
DVQKNDATKVVNKKITIPQTGGIGTIIFAVAGAVIMGIAVYAYVKNNKDE
DQLA

[1243] ORF5_{—}23FTW is a cell wall surface protein. An example of an amino acid sequence of ORF5_{—}23FTW is set forth in SEQ ID NO: 232.

SEQ ID NO: 232

MTMQKMQKMISRIFFVMALCFSLVWGAHAVQAQEDHTLVLQLENYQEVVS
QLPSRDGHRLQVWKLDDSYSYDNRVQIVRDLHSWDENKLSSFKKTSEEMT
FLENQIEVSHIPNGLYYVRSIIQTDAVSYPAEFLFEMTDQTVEPLVIVAK
KADTVTTKVKLIKVDQDHNRLEGVGFKLVSVARDGSEKEVPLIGEYRYSS
SGQVGRTLYTDKNGEIVVTNLPLGTYRFKEVEPLAGYTVTTMDTDVQLVD
HQLVTITVVNQKLPRGNVDFMKVDGRTNTSLQGAMFKVMKEENGHYTPVL
QNGKEVVVASGKDGRFRVEGLEYGTYYLWELQAPTGYVQLTSPVSFTIGK
DTRKELVTVVKNNKRPRIDVPDTGEETLYILMLVAILLFGSGYYLTKKTN
N

[1244] ORF6_{—}23FTW is a putative sortase. An example of an amino acid sequence of ORF6_{—}23FTW is set forth in SEQ ID NO: 233.

SEQ ID NO: 233

MLIKMVKTKKQKRNNLLLGVVFFIGMAVMAYPLVSRLYYRVESNQQIADF
DKEKATLDEADIDERMKLAQAFNDSLNNVVSGDPWSEEMKKKGRAEYARM
LEIHERMGHVEIPVIDVDLPVYAGTAEEVLQQGAGQLEGTSLPIGGNSTH
AVITAHTGLPTAKMFTDLTKLKVGDKFYVHNIKEVMAYQVDQVKVIEPTN
FDDLLIVPGHDYVTLLTCTPYMINTHRLLVRGHRIPYVAEVEEEFIAANK
LSHLYRYLFYVAVGLIVILLWIIRRLRKKKKQPEKALKALKAARKEVKVE
DGQQ

[1245] ORF7_{—}23FTW is a putative sortase. An example of an amino acid sequence of ORF7_{—}23FTW is set forth in SEQ ID NO: 234.

SEQ ID NO: 234

MDNSRRSRKKGTKKKKHPLILLLIFLVGFAVAIYPLVSRYYYRIESNEVI
KEFDETVSQMDKAELEERWRLAQAFNATLKPSEILDPFThQEKKKGVSEY
ANMLKVHERIGYVEIPAIDQEIPMYVGTSEEILQKGAGLLEGASLPVGGE
NTHTVVTAHRGLPTAELFSQLDKMKKGDVFYLHVLDQVLAYQVDQILTVE
PNDFEPVLIQHGKDYATLLTCTPYMINSHRLLVRGKRIPYTAPIAERNRA
VRERGQFWLWLLLAALVMILVLSYGVYRHRRIVKGLEKQLEEHHVKG

[1246] ORF8_{—}23FTW is a putative sortase. An example of an amino acid sequence of ORF8_{—}23FTW is set forth in SEQ ID NO: 235.

SEQ ID NO: 235

MSKAKLQKLLGYLLMLVALVIPVYCFGQMVLQSLGQVKGHETFSESVTAD
SYQEQLQRSLDYNQRLDSQNRIVDPFLAEGYEVNYQVSDDPDAVYGYLSI
PSLEIMEPVYLGADYHHLAMGLAHVDGTPLPVEGKGTRSVIAGHPAEPSH
VFFRHLDQLKVGDALYYDNGQEIVEYQMMDTEIILPSEWEKLESVSSKNI
MTLITCDPIPTFNKRLLVNFERVAVYQKSDPQTAAVARVAFTKEGQSVSR
VATSQWLYRGLVVLAFLGILFVLWKLARLLRGK

[1247] As discussed above, a S. pneumoniae AI sequence is present in the 23F Poland 16 S. pneumoniae genome. Examples of S. pneumoniae AI sequences from 23F Poland 16 are set forth below.

[1248] ORF2_{—}23FP is a transcriptional regulator. An example of an amino acid sequence of ORF2_{—}23FP is set forth in SEQ ID NO: 236.

+TR, SEQ ID NO: 236
MLNKYIEKRITDKITILNILLDIRSIELDELSTLTSLQSKSLLSILQELQ
ETFEEELTFNLDTQQVQLIEHHSHQTNYYFHQLYNQSTILKILRFFLLQG
NQSFNEFTQKEYISIATGYRVRQKCGLLLRSVGLDLVKNQVVGPEYRIRF
LIALLQFHFGIEIYDLNDGSMDWVTHMIVQSNSQLSHELLEITPDEYVHF
SILVALTWKRREFPLEFPESKEFEKLKNLFMYPILMEHCQTYLEPHANMT
FTQEELDYIFLVYCSANSSFSKDKWNQEKKTHTIQLILQHTRGKHLLSKF
KNILGNDISNSLSFLTALTFLTRTFLFGLQNLVPYYNYYEHYGIESDKPL
YHISKATVQEWMTEQKIEGVIDQHRLYLFSLYLTETIFSSLPAIPIFIIL
NNQADVNLIKSIILRNFTDKVASVTGYNILISPPPSEEHLTEPLIIITTK
EYLPYVKKQYPKGKHHELTIALDLHVSQQRLIYQTIVDIRKEAFDKRVAN
IAKKAHYLL

[1249] ORF3_{—}23FP is a cell wall surface protein. An example of an amino acid sequence of ORF3_{—}23FP is set forth in SEQ ID NO: 237.

SEQ ID NO: 237

MKKVRKIFQKAVAGLCCISQLTAFSSIVALAETPETSPAIGKVVIKETGE
GGALLGDAVFELKNNTDGTTVSQRTEAQTGEAIFSNIKPGTYTLTEAQPP
VGYKPSTKQWTVEVEKNGRTTVQGEQVENREEALSDQYPQTGTYPDVQTP
YQIIKVDGSEKNGQHKALNPNPYERVIPEGTLSKRIYQVNNLDDNQYGIE
LTVSGKTTVETKEASTPLDVVTLLDNSNSMSNIRHNHAHRAEKAGEATRA
LVDKITSNPDNRVALVTYGSTIFDGSEATVEKGVADANGKTLNDSALWTE
DRTTFTAKTYNYSFLNLTSDPTDIQTIKDRIPSDAEELNKDKLMYQFGAT
FTQKALMTADDILTKQARPNSKKVIFHITDGVPTMSYPINFKYTGTTQSY
RTQLNNFKAKTPNSSGILLEDFVTWSADGEHKIVRGDGESYQMFTKKPVT
DQYGVHQILSITSMEQRAKLVSAGYRFYGTDLYLYWRDSILAYPFNSSTD
WITNHGDPTTWYYNGNMAQDGYDVFTVGVGVNGDPGTDEATATRFMQSIS
SSPDNYTNVADPSQILQELNRYFYTIVNEKKSIENGTITDPMGELIDFQL
GADGRFDPADYTLTANDGSSLVNNVPTGGPQNDGGLLKNAKVFYDTTEKR
IRVTGLYLGTGEKVTLTYNVRLNDQFVSNKFYDTNGRTTLHPKEVEKNTV
RDFPIPKIRDVRKYPEITIPKEKKLGEIEFIKINKNDKKPLRDAVFSLQK
QHPDYPDIYGAIDQNGTYQNVRTGEDGKLTFKNLSDGKYRLFENSEPAGY
KPVQNKPIVAFQIVNGEVRDVTSIVPQDIPAGYEETNDKHYITNEPIPPK
REYPRTGGIGMLPFYLIGCMMMGGVLLYTRKNP

[1250] ORF4_{—}23FP is a cell wall surface protein. An example of an amino acid sequence of ORF4_{—}23FP is set forth in SEQ ID NO: 238.

SEQ ID NO: 238

MKSINKFLTMLAALLLTASSLFSAATVFAADNVSTAPDAVTKTLTIHKLL
LSEDDLKTWDTNGPKGYDGTQSSLKDLTGVVAEEIPNVYFELQKYNLTDG
KEKENLKDDSKWTTVHGGLTTKDGLKIETSTLKGVYRIREDRTKTTYVGP
NGQVLTGSKAVPALVTLPLVNNNGTVIDAHVEPKNSYNKPVVDKRIADTL
NYNDQNGLSIGTKIPYVVNTTIPSNATFATSFWSDEMTEGLTYNEDVTIT
LNNVAMDQADYEVTKGINGFNLKLTEAGLAKINGKDADQKIQITYSATLN
SLAVADIPESNDITYHYGNHQDHGNTPKPTKPNNGQITVTKTWDSQPAPE
GVKATVQLVNAKTGEKVGAPVELSENNWTYTWSGLDNSIEYKVEEEYNGY
SAEYTVESKGKLGVKNWKDNNPAPINLEEPRVKTYGKKFVKVDQKDTRLE
NAQFVVKKADSNKYIAFKSTAQQAADEKAAATAKQKLDAAVAAYTNAADK
QAAQALVDQAQQEYNVAYKEAKFGYVEVAGKDEAMVLTSNTDGQFQISGL
AAGTYKLEEIKAPEGFAKIDDVEFVVGAGSWNQGEFNYLKDVQKNDATKV
VNKKITIPQTGGIGTIIFAVAGAVIMGIAVYAYVKNNKDEDQLA

[1251] ORF5_{—}23FP is a cell wall surface protein. An example of an amino acid sequence of ORF5_{—}23FP is set forth in SEQ ID NO: 239.

SEQ ID NO: 239

MTMQKMQKMISRIFFVMALCFSLVWGAHAVQAQEDHTLVLQLENYQEVVS
QLPSRDGHRLQVWKLDDSYSYDNRVQIVRDLHSWDENKLSSFKKTSFEMT
FLSNQIEVSHIPNGLYYVRSIIQTDAVSYPAEFLFEMTDQTVEPLVIVAK
KADTVTTKVKLIKVDQDHNRLEGVGFKLVSVARDGSEKEVPLIGEYRYSS
SGQVGRTLYTDKNGEIVVTNLPLGTYRFKEVEPLAGYAVTTMDTDVQLVD
HQLVTITVVNQKLPRGNVDFMKVDGRTNTSLQGAMFKVMKEENGHYTPVL
QNGKEVVVASGKDGRFRVEGLEYGTYYLWELQAPTGYVQLTSPVSFTIGK
DTRKELVTVVKNNKRPRTDVPDTGEETLYILMLVAILLFGSGYYLTKKTN
N

[1252] ORF6_{—}23FP is a putative sortase. An example of an amino acid sequence of ORF6_{—}23FP is set forth in SEQ ID NO: 240.

SEQ ID NO: 240

MLIKMAKTKKQKRNNLLLGVVFFIGIAVMAYPLVSRLYYRVESNQQIADF
DKEKATLDEADIDERMKLAQAFNDSLNNVVSGDPWSEEMKKKGRAEYARM
LEIHERMGHVETPAIDVDLPVYAGTAEEVLQQGAGHLEGTSLPIGGNSTH
AVITAHTGLPTAKMFTDLTKLKVGDKFYVHNIKEVMAYQVDQVKVIEPTN
FDDLLIVPGHDYVTLLTCTPYMINTHRLLVRGHRIPYVAEVEEEFIAANK
LSHLYRYLFYVAVGLIVILLWIIRRLRKKKRQSERALKALKEATKEVKVE
DE

[1253] ORF7_{—}23FP is a putative sortase. An example of an amino acid sequence of ORF7_{—}23FP is set forth in SEQ ID NO: 241.

SEQ ID NO: 241

MSKSRYSRKKSVKKKKNPFILLLIFLVGLAVAMYPLVSRYYYRIESNEVI
KEFDETVSQMDKAELEERWRLAQAFNATLKPSEILDPFTEQEKKKGVSEY
ANMLKVHERIGYVEIPAIDQEIPMYVGTSEETLQKGAGLLEGASLPVGGE
NTHTVVTAHRGLPTAELFSQLDKMKKGDIFYLHVLDQVLAYQVDQIVTVE
PNDFEPVLIQHGEDYATLLTCTPYMINSHRLLVRGKRIPYTAPIAERNRA
VRERGQFWLWLLLGAMAVILLLLYRVYRNRRIVKGLEKQLEGRHVKD

[1254] ORF8_{—}23FP is a putative sortase. An example of an amino acid sequence of ORF8_{—}23FP is set forth in SEQ ID NO: 242.

SEQ ID NO: 242

MSKSRYSRKKSVKKKKNPFILLLIFLVGLAVAMYPLVSRYYYRIESNEVI
KEFDETVSQMDKAELEERWRLAQAFFLAEGYEVNYQVSDDPDAVYGYLSI
PSLEIMEPVYLGADYHHLGMGLAHVDGTPLPLDGTGIRSVIAGHPAEPSH
VEFRHLDQLKVGDALYYDNGQEIVEYQMMDTEIILPSEWEKLESVSSKNI
MTLITCDPIPTFNKRLLVNFERVAVYQKSDPQTAAVARVAFTKEGQSVSR
VATSQWLYRGLVVLAFLGILFVLWKLARLLRGK

[1255] Immunogenic compositions of the invention comprising AI antigens may further comprise one or more antigenic agents. Preferred antigens include those listed below. Additionally, the compositions of the present invention may be used to treat or prevent infections caused by any of the below-listed microbes. Antigens for use in the immunogenic compositions include, but are not limited to, one or more of the following set forth below, or antigens derived from one or more of the following set forth below:

[1256] Bacterial Antigens

[1257] N. meningitides: a protein antigen from N. meningitides serogroup A, C, W135, Y, and/or B (1-7); an outer-membrane vesicle (OMV) preparation from N. meningitides serogroup B. (8, 9, 10, 11); a saccharide antigen, including LPS, from N. meningitides serogroup A, B, C W135 and/or Y, such as the oligosaccharide from serogroup C (see PCT/US99/09346; PCT IB98/01665; and PCT IB99/00103);

[1258] Streptococcus pneumoniae: a saccharide or protein antigen, particularly a saccharide from Streptooccus pneumoniae;

[1259] Streptococcus agalactiae: particularly, Group B streptococcus antigens;

[1260] Streptococcus pyogenes: particularly, Group A streptococcus antigens;

[1261] Enterococcus faecalis or Enterococcus faecium: Particularly a trisaccharide repeat or other Enterococcus derived antigens provided in U.S. Pat. No. 6,756,361;

[1262] Helicobacter pylori. including: Cag, Vac, Nap, HopX, HopY and/or urease antigen;

[1263] Bordetella pertussis: such as petussis holotoxin (PT) and filamentous haemagglutinin (FHA) from B. pertussis, optionally also combination with pertactin and/or agglutinogens 2 and 3 antigen;

[1264] Staphylococcus aureus: including S. aureus type 5 and 8 capsular polysaccharides optionally conjugated to nontoxic recombinant Pseudomonas aeruginosa exotoxin A, such as StaphVAX™, or antigens derived from surface proteins, invasins (leukocidin, kinases, hyaluronidase), surface factors that inhibit phagocytic engulfment (capsule, Protein A), carotenoids, catalase production, Protein A, coagulase, clotting factor, and/or membrane-damaging toxins (optionally detoxified) that lyse eukaryotic cell membranes (hemolysins, leukotoxin, leukocidin);

[1265] Staphylococcus epidermis: particularly, S. epidermidis slime-associated antigen (SAA);

[1266] Staphylococcus saprophyticus: (causing urinary tract infections) particularly the 160 kDa hemagglutinin of S. saprophyticus antigen;

[1267] Pseudomonas aeruginosa. particularly, endotoxin A, Wzz protein, P. aeruginosa LPS, more particularly LPS isolated from PAO1 (O5 serotype), and/or Outer Membrane Proteins, including Outer Membrane Proteins F (OprF) (Infect Immun. 2001 May; 69(5): 3510-3515);

[1268] Bacillus anthracis (anthrax): such as B. anthracis antigens (optionally detoxified) from A-components (lethal factor (LF) and edema factor (EF)), both of which can share a common B-component known as protective antigen (PA);

[1269] Moraxella catarrhalis. (respiratory) including outer membrane protein antigens (HMW-OMP), C-antigen, and/or LPS;

[1270] Yersinia pestis (plague): such as F1 capsular antigen (Infect Immun. 2003 January; 71(1)): 374-383, LPS (Infect Immun. 1999 October; 67(10): 5395), Yersinia pestis V antigen (Infect Immun. 1997 November; 65(11): 4476-4482);

[1271] Yersinia enterocolitica (gastrointestinal pathogen): particularly LPS (Infect Immun. 2002 August; 70(8): 4414);

[1272] Yersinia pseudotuberculosis: gastrointestinal pathogen antigens;

[1273] Mycobacterium tuberculosis: such as lipoproteins, LPS, BCG antigens, a fusion protein of antigen 85B (Ag85B) and/or ESAT-6 optionally formulated in cationic lipid vesicles (Infect Immun. 2004 October; 72(10): 6148), Mycobacterium tuberculosis (Mtb) isocitrate dehydrogenase associated antigens (Proc Natl Acad Sci USA. 2004 Aug. 24; 101(34): 12652), and/or MPT51 antigens (Infect Immun. 2004 July; 72(7): 3829);

[1274] Legionella pneumophila (Legionnairs' Disease): L. pneumophila antigens—optionally derived from cell lines with disrupted asd genes (Infect Immun. 1998 May; 66(5): 1898);

[1275] Rickettsia: including outer membrane proteins, including the outer membrane protein A and/or B (OmpB) (Biochim Biophys Acta. 2004 Nov. 1; 1702(2): 145), LPS, and surface protein antigen (SPA) (J Autoimmun. 1989 June; 2 Suppl:81);

[1276] E. coli: including antigens from enterotoxigenic E. coli (ETEC), enteroaggregative E. coli (EAggEC), diffusely adhering E. coli (DAEC), enteropathogenic E. coli (EPEC), and/or enterohemorrhagic E. coli (EHEC);

[1277] Vibrio cholerae: including proteinase antigens, LPS, particularly lipopolysaccharides of Vibrio cholerae II, O1 Inaba O-specific polysaccharides, V. cholera O139, antigens of IEM108 vaccine (Infect Immun. 2003 October; 71(10):5498-504), and/or Zonula occludens toxin (Zot);

[1278] Salmonella typhi (typhoid fever): including capsular polysaccharides preferably conjugates (Vi, i.e. vax-TyVi);

[1279] Salmonella typhimurium (gastroenteritis): antigens derived therefrom are contemplated for microbial and cancer therapies, including angiogenesis inhibition and modulation of flk;

[1280] Listeria monocytogenes (sytemic infections in immunocompromised or elderly people, infections of fetus): antigens derived from L. monocytogenes are preferably used as carriers/vectors for intracytoplasmic delivery of conjugates/associated compositions of the present invention;

[1281] Porphyromonas gingivalis: particularly, P. gingivalis outer membrane protein (OMP);

[1282] Tetanus: such as tetanus toxoid (TT) antigens, preferably used as a carrier protein in conjunction/conjugated with the compositions of the present invention;

[1283] Diphtheria: such as a diphtheria toxoid, preferably CRM₁₉₇, additionally antigens capable of modulating, inhibiting or associated with ADP ribosylation are contemplated for combination/co-administration/conjugation with the compositions of the present invention, the diphtheria toxoids are preferably used as carrier proteins;

[1284] Borrelia burgdorferi (Lyme disease): such as antigens associated with P39 and P13 (an integral membrane protein, Infect Immun. 2001 May; 69(5): 3323-3334), VlsE Antigenic Variation Protein (J Clin Microbiol. 1999 December; 37(12): 3997);

[1285] Haemophilis influenzae B: such as a saccharide antigen therefrom;

[1286] Klebsiella: such as an OMP, including OMP A, or a polysaccharide optionally conjugated to tetanus toxoid;

[1287] Neiserria gonorrhoeae: including, a Por (or porin) protein, such as PorB (see Zhu et al., Vaccine (2004) 22:660-669), a transferring binding protein, such as ThpA and TbpB (See Price et al., Infection and Immunity (2004) 71(1):277-283), a opacity protein (such as Opa), a reduction-modifiable protein (Rmp), and outer membrane vesicle (OMV) preparations (see Plante et al., J Infectious Disease (2000) 182:848-855), also see e.g. WO99/24578, WO99/36544, WO99/57280, WO02/079243);

[1288] Chlamydia pneumoniae. particularly C. pneumoniae protein antigens;

[1289] Chlamydia trachomatis: including antigens derived from serotypes A, B, Ba and C are (agents of trachoma, a cause of blindness), serotypes L₁, L₂ & L₃ (associated with Lymphogranuloma venereum), and serotypes, D-K;

[1290] Treponema pallidum (Syphilis): particularly a TmpA antigen; and

[1291] Haemophilus ducreyi (causing chancroid): including outer membrane protein (DsrA).

[1292] Where not specifically referenced, further bacterial antigens of the invention may be capsular antigens, polysaccharide antigens or protein antigens of any of the above. Further bacterial antigens may also include an outer membrane vesicle (OMV) preparation. Additionally, antigens include live, attenuated, split, and/or purified versions of any of the aforementioned bacteria. The bacterial or microbial derived antigens of the present invention may be gram-negative or gram-positive and aerobic or anaerobic.

[1293] Additionally, any of the above bacterial-derived saccharides (polysaccharides, LPS, LOS or oligosaccharides) can be conjugated to another agent or antigen, such as a carrier protein (for example CRM₁₉₇). Such conjugation may be direct conjugation effected by reductive amination of carbonyl moieties on the saccharide to amino groups on the protein, as provided in U.S. Pat. No. 5,360,897 and Can J Biochem Cell Biol. 1984 May;62(5):270-5. Alternatively, the saccharides can be conjugated through a linker, such as, with succinamide or other linkages provided in Bioconjugate Techniques, 1996 and CRC, Chemistry of Protein Conjugation and Cross-Linking, 1993.

[1294] Viral Antigens

[1295] Influenza: including whole viral particles (attenuated), split, or subunit comprising hemagglutinin (HA) and/or neuraminidase (NA) surface proteins, the influenza antigens may be derived from chicken embryos or propogated on cell culture, and/or the influenza antigens are derived from influenza type A, B, and/or C, among others;

[1296] Respiratory syncytial virus (RSV): including the F protein of the A2 strain of RSV (J Gen Virol. 2004 November; 85(Pt 11):3229) and/or G glycoprotein;

[1297] Parainfluenza virus (PIV): including PIV type 1, 2, and 3, preferably containing hemagglutinin, neuraminidase and/or fusion glycoproteins;

[1298] Poliovirus: including antigens from a family of picornaviridae, preferably poliovirus antigens such as OPV or, preferably IPV;

[1299] Measles: including split measles virus (MV) antigen optionally combined with the Protollin and or antigens present in MMR vaccine;

[1300] Mumps: including antigens present in MMR vaccine;

[1301] Rubella: including antigens present in MMR vaccine as well as other antigens from Togaviridae, including dengue virus;

[1302] Rabies: such as lyophilized inactivated virus (RabAvert™);

[1303] Flaviviridae viruses: such as (and antigens derived therefrom) yelow fever virus, Japanese encephalitis virus, dengue virus (types 1, 2, 3, or 4), tick borne encephalitis virus, and West Nile virus;

[1304] Caliciviridae; antigens therefrom;

[1305] HIV: including HIV-1 or HIV-2 strain antigens, such as gag (p24gag and p55gag), env (gp160 and gp41), pol, tat, nef, rev vpu, miniproteins, (preferably p55 gag and gp140v delete) and antigens from the isolates HIV_{IIb}, HIV_{SF2}, HIV_{LAV}, HIV_{LA1}, HUV_{MN}, HIV-1_{CM235}, HIV-1_{US4}, HIV-2; simian immunodeficiency virus (SIV) among others;

[1306] Rotavirus: including VP4, VP5, VP6, VP7, VP8 proteins (Protein Expr Purif. 2004 December; 38(2):205) and/or NSP4;

[1307] Pestivirus: such as antigens from classical porcine fever virus, bovine viral diarrhoea virus, and/or border disease virus;

[1308] Parvovirus: such as parvovirus B19;

[1309] Coronavirus: including SARS virus antigens, particularly spike protein or proteases therefrom, as well as antigens included in WO 04/92360;

[1310] Hepatitis A virus: such as inactivated virus;

[1311] Hepatitis B virus: such as the surface and/or core antigens (sAg), as well as the presurface sequences, pre-S1 and pre-S2 (formerly called pre-S), as well as combinations of the above, such as sAg/pre-S1, sAg/pre-S2, sAg/pre-S1/pre-S2, and pre-S1/pre-S2, (see, e.g., AHBV Vaccines—Human Vaccines and Vaccination, pp. 159-176; and U.S. Pat. Nos. 4,722,840, 5,098,704, 5,324,513; Beames et al., J. Virol. (1995) 69:6833-6838, Birnbaum et al., J. Virol. (1990) 64:3319-3330; and Zhou et al., J. Virol. (1991) 65:5457-5464);

[1312] Hepatitis C virus: such as E1, E2, E1/E2 (see, Houghton et al., Hepatology (1991) 14:381), NS345 polyprotein, NS 345-core polyprotein, core, and/or peptides from the nonstructural regions (International Publication Nos. WO 89/04669; WO 90/11089; and WO 90/14436);

[1313] Delta hepatitis virus (HDV): antigens derived therefrom, particularly δ-antigen from HDV (see, e.g., U.S. Pat. No. 5,378,814);

[1314] Hepatitis E virus (HEV); antigens derived therefrom;

[1315] Hepatitis G virus (HGV), antigens derived therefrom;

[1316] Varcicella zoster virus: antigens derived from varicella zoster virus (VZV) (J. Gen. Virol. (1986) 67:1759);

[1317] Epstein-Barr virus: antigens derived from EBV (Baer et al., Nature (1984) 310:207);

[1318] Cytomegalovirus: CMV antigens, including gB and gH (Cytomegaloviruses (J. K. McDougall, ed., Springer-Verlag 1990) pp. 125-169);

[1319] Herpes simplex virus: including antigens from HSV-1 or HSV-2 strains and glycoproteins gB, gD and gH (McGeoch et al., J. Gen. Virol. (1988)69:1531 and U.S. Pat. No. 5,171,568);

[1320] Human Herpes Virus: antigens derived from other human herpesviruses such as HHV6 and HHV7; and

[1321] HPV: including antigens associated with or derived from human papillomavirus (HPV), for example, one or more of E1-E7, L1, L2, and fusions thereof, particularly the compositions of the invention may include a virus-like particle (VLP) comprising the L1 major capsid protein, more particular still, the HPV antigens are protective against one or more of HPV serotypes 6, 11, 16 and/or 18.

[1322] Further provided are antigens, compostions, methods, and microbes included in Vaccines, 4^{th} Edition (Plotkin and Orenstein ed. 2004); Medical Microbiology 4^{th} Edition (Murray et al. ed. 2002); Virology, 3rd Edition (W. K. Joklik ed. 1988); Fundamental Virology, 2nd Edition (B. N. Fields and D. M. Knipe, eds. 1991), which are contemplated in conjunction with the compositions of the present invention.

[1323] Additionally, antigens include live, attenuated, split, and/or purified versions of any of the aforementioned viruses.

[1324] Fungal Antigens

[1325] Fungal antigens for use herein, associated with vaccines include those described in: U.S. Pat. Nos. 4,229,434 and 4,368,191 for prophylaxis and treatment of trichopytosis caused by Trichophyton mentagrophytes; U.S. Pat. Nos. 5,277,904 and 5,284,652 for a broad spectrum dermatophyte vaccine for the prophylaxis of dermatophyte infection in animals, such as guinea pigs, cats, rabbits, horses and lambs, these antigens comprises a suspension of killed T. equinum, T. mentagrophytes (var. granulare), M. canis and/or M gypseum in an effective amount optionally combined with an adjuvant; U.S. Pat. Nos. 5,453,273 and 6,132,733 for a ringworm vaccine comprising an effective amount of a homogenized, formaldehyde-killed fungi, i.e., Microsporum canis culture in a carrier; U.S. Pat. No. 5,948,413 involving extracellular and intracellular proteins for pythiosis. Additional antigens identified within antifungal vaccines include Ringvac bovis LTF-130 and Bioveta.

[1326] Further, fungal antigens for use herein may be derived from Dermatophytres, including: Epidermophyton floccusum, Microsporum audouini, Microsporum canis, Microsporum distortum, Microsporum equinum, Microsporum gypsum, Microsporum nanum, Trichophyton concentricum, Trichophyton equinum, Trichophyton gallinae, Trichophyton gypseum, Trichophyton megnini, Trichophyton mentagrophytes, Trichophyton quinckeanum, Trichophyton rubrum, Trichophyton schoenleini, Trichophyton tonsurans, Trichophyton verrucosum, T. verrucosum var. album, var. discoides, var. ochraceum, Trichophyton violaceum, and/or Trichophyton faviforme.

[1327] Fungal pathogens for use as antigens or in derivation of antigens in conjunction with the compositions of the present invention comprise Aspergillus fumigatus, Aspergillus flavus, Aspergillus niger, Aspergillus nidulans, Aspergillus terreus, Aspergillus sydowi, Aspergillus flavatus, Aspergillus glaucus, Blastoschizomyces capitatus, Candida albicans, Candida enolase, Candida tropicalis, Candida glabrata, Candida krusei, Candida parapsilosis, Candida stellatoidea, Candida kusei, Candida parakwsei, Candida lusitaniae, Candida pseudotropicalis, Candida guilliermondi, Cladosporium carrionii, Coccidioides immitis, Blastomyces dermatidis, Cryptococcus neoformans, Geotrichum clavatum, Histoplasma capsulatum, Klebsiella pneumoniae, Paracoccidioides brasiliensis, Pneumocystis carinii, Pythiumn insidiosum, Pityrosporum ovale, Sacharomyces cerevisae, Saccharomyces boulardii, Saccharomyces pombe, Scedosporium apiosperum, Sporothrix schenckii, Trichosporon beigelii, Toxoplasma gondii, Penicillium marneffei, Malassezia spp., Fonsecaea spp., Wangiella spp., Sporothrix spp., Basidiobolus spp., Conidiobolus spp., Rhizopus spp, Mucor spp, Absidia spp, Mortierella spp, Cunninghamella spp, and Saksenaea spp.

[1328] Other fungi from which antigens are derived include Alternaria spp, Curvularia spp, Helminthosporium spp, Fusarium spp, Aspergillus spp, Penicillium spp, Monolinia spp, Rhizoctonia spp, Paecilomyces spp, Pithomyces spp, and Cladosporium spp.

[1329] Processes for producing a fungal antigens are well known in the art (see U.S. Pat. No. 6,333,164). In a preferred method a solubilized fraction extracted and separated from an insoluble fraction obtainable from fungal cells of which cell wall has been substantially removed or at least partially removed, characterized in that the process comprises the steps of: obtaining living fungal cells; obtaining fungal cells of which cell wall has been substantially removed or at least partially removed; bursting the fungal cells of which cell wall has been substantially removed or at least partially removed; obtaining an insoluble fraction; and extracting and separating a solubilized fraction from the insoluble fraction.

[1330] STD Antigens

[1331] In particular embodiments, microbes (bacteria, viruses and/or fungi) against which the present compositions and methods can be implement include those that cause sexually transmitted diseases (STDs) and/or those that display on their surface an antigen that can be the target or antigen composition of the invention. In a preferred embodiment of the invention, compositions are combined with antigens derived from a viral or bacterial STD. Antigens derived from bacteria or viruses can be administered in conjunction with the compositions of the present invention to provide protection against at least one of the following STDs, among others: chlamydia, genital herpes, hepatitis (particularly HCV), genital warts, gonorrhoea, syphilis and/or chancroid (See, WO00/15255).

[1332] In another embodiment the compositions of the present invention are co-administered with an antigen for the prevention or treatment of an STD.

[1333] Antigens derived from the following viruses associated with STDs, which are described in greater detail above, are preferred for co-administration with the compositions of the present invention: hepatitis (particularly HCV), HPV, HIV, or HSV.

[1334] Additionally, antigens derived from the following bacteria associated with STDs, which are described in greater detail above, are preferred for co-administration with the compositions of the present invention: Neiserria gonorrhoeae, Chlamydia pneumoniae, Chlamydia trachomatis, Treponema pallidum, or Haemophilus ducreyi.

[1335] Respiratory Antigens

[1336] The antigen may be a respiratory antigen and could further be used in an immunogenic composition for methods of preventing and/or treating infection by a respiratory pathogen, including a virus, bacteria, or fungi such as respiratory syncytial virus (RSV), PIV, SARS virus, influenza, Bacillus anthracis, particularly by reducing or preventing infection and/or one or more symptoms of respiratory virus infection. A composition comprising an antigen described herein, such as one derived from a respiratory virus, bacteria or fungus is administered in conjunction with the compositions of the present invention to an individual which is at risk of being exposed to that particular respiratory microbe, has been exposed to a respiratory microbe or is infected with a respiratory virus, bacteria or fungus. The composition(s) of the present invention is/are preferably co-administered at the same time or in the same formulation with an antigen of the respiratory pathogen. Administration of the composition results in reduced incidence and/or severity of one or more symptoms of respiratory infection.

[1337] Pediatric/Geriatric Antigens

[1338] In one embodiment the compositions of the present invention are used in conjunction with an antigen for treatment of a pediatric population, as in a pediatric antigen. In a more particular embodiment the pediatric population is less than about 3 years old, or less than about 2 years, or less than about 1 years old. In another embodiment the pediatric antigen (in conjunction with the composition of the present invention) is administered multiple times over at least 1, 2, or 3 years.

[1339] In another embodiment the compositions of the present invention are used in conjunction with an antigen for treatment of a geriatric population, as in a geriatric antigen.

[1340] Other Antigens

[1341] Other antigens for use in conjunction with the compositions of the present include hospital acquired (nosocomial) associated antigens.

[1342] In another embodiment, parasitic antigens are contemplated in conjunction with the compositions of the present invention. Examples of parasitic antigens include those derived from organisms causing malaria and/or Lyme disease.

[1343] In another embodiment, the antigens in conjunction with the compositions of the present invention are associated with or effective against a mosquito bom illness. In another embodiment, the antigens in conjunction with the compositions of the present invention are associated with or effective against encephalitis. In another embodiment the antigens in conjunction with the compositions of the present invention are associated with or effective against an infection of the nervous system.

[1344] In another embodiment, the antigens in conjunction with the compositions of the present invention are antigens transmissible through blood or body fluids.

[1345] Antigen Formulations

[1346] In other aspects of the invention, methods of producing microparticles having adsorbed antigens are provided. The methods comprise: (a) providing an emulsion by dispersing a mixture comprising (i) water, (ii) a detergent, (iii) an organic solvent, and (iv) a biodegradable polymer selected from the group consisting of a poly(α-hydroxy acid), a polyhydroxy butyric acid, a polycaprolactone, a polyorthoester, a polyanhydride, and a polycyanoacrylate. The polymer is typically present in the mixture at a concentration of about 1% to about 30% relative to the organic solvent, while the detergent is typically present in the mixture at a weight-to-weight detergent-to-polymer ratio of from about 0.00001:1 to about 0.1:1 (more typically about 0.0001:1 to about 0.1:1, about 0.001:1 to about 0.1:1, or about 0.005:1 to about 0.1:1); (b) removing the organic solvent from the emulsion; and (c) adsorbing an antigen on the surface of the microparticles. In certain embodiments, the biodegradable polymer is present at a concentration of about 3% to about 10% relative to the organic solvent.

[1347] Microparticles for use herein will be formed from materials that are sterilizable, non-toxic and biodegradable. Such materials include, without limitation, poly(α-hydroxy acid), polyhydroxybutyric acid, polycaprolactone, polyorthoester, polyanhydride, PACA, and polycyanoacrylate. Preferably, microparticles for use with the present invention are derived from a poly(α-hydroxy acid), in particular, from a poly(lactide) (“PLA”) or a copolymer of D,L-lactide and glycolide or glycolic acid, such as a poly(D,L-lactide-co-glycolide) (“PLG” or “PLGA”), or a copolymer of D,L-lactide and caprolactone. The microparticles may be derived from any of various polymeric starting materials which have a variety of molecular weights and, in the case of the copolymers such as PLG, a variety of lactide:glycolide ratios, the selection of which will be largely a matter of choice, depending in part on the coadministered macromolecule. These parameters are discussed more fully below.

[1348] Further antigens may also include an outer membrane vesicle (OMV) preparation.

[1349] Additional formulation methods and antigens (especially tumor antigens) are provided in U.S. patent Ser. No. 09/581,772.

[1350] Antigen References

[1351] The following references include antigens useful in conjunction with the compositions of the present invention:
[1352] 1 International patent application WO99/24578
[1353] 2 International patent application WO99/36544.
[1354] 3 International patent application WO99/57280.
[1355] 4 International patent application WO00/22430.
[1356] 5 Tettelin et al. (2000) Science 287:1809-1815.
[1357] 6 International patent application WO96/29412.
[1358] 7 Pizza et al. (2000) Science 287:1816-1820.
[1359] 8 PCT WO 01/52885.
[1360] 9 Bjune et al. (1991) Lancet 338(8775).
[1361] 10 Fuskasawa et al. (1999) Vaccine 17:2951-2958.
[1362] 11 Rosenqist et al. (1998) Dev. Biol. Strand 92:323-333.
[1363] 12 Constantino et al. (1992) Vaccine 10:691-698.
[1364] 13 Constantino et al. (1999) Vaccine 17:1251-1263.
[1365] 14 Watson (2000) Pediatr Infect Dis J 19:331-332.
[1366] 15 Rubin (20000) Pediatr Clin North Am 47:269-285, v.
[1367] 16 Jedrzejas (2001) Microbiol Mol Biol Rev 65:187-207.
[1368] 17 International patent application filed on 3^{rd} Jul. 2001 claiming priority from GB-0016363.4; WO 02/02606; PCT IB/01/00166.
[1369] 18 Kalman et al. (1999) Nature Genetics 21:385-389.
[1370] 19 Read et al. (2000) Nucleic Acids Res 28:1397-406.
[1371] 20 Shirai et al. (2000) J. Infect. Dis 181(Suppl 3):S524-S527.
[1372] 21 International patent application WO99/27105.
[1373] 22 International patent application WO00/27994.
[1374] 23 International patent application WO00/37494.
[1375] 24 International patent application WO99/28475.
[1376] 25 Bell (2000) Pediatr Infect Dis J 19:1187-1188.
[1377] 26 Iwarson (1995) APMIS 103:321-326.
[1378] 27 Gerlich et al. (1990) Vaccine 8 Suppl:S63-68 & 79-80.
[1379] 28 Hsu et al. (1999) Clin Liver Dis 3:901-915.
[1380] 29 Gastofsson et al. (1996) N. Engl. J. Med. 334-:349-355.
[1381] 30 Rappuoli et al. (1991) TIBTECH 9:232-238.
[1382] 31 Vaccines (1988) eds. Plotkin & Mortimer. ISBN 0-7216-1946-0.
[1383] 32 Del Guidice et al. (1998) Molecular Aspects of Medicine 19:1-70.
[1384] 33 International patent application WO93/018150.
[1385] 34 International patent application WO99/53310.
[1386] 35 International patent application WO98/04702.
[1387] 36 Ross et al. (2001) Vaccine 19:135-142.
[1388] 37 Sutter et al. (2000) Pediatr Clin North Am 47:287-308.
[1389] 38 Zimmerman & Spann (1999) Am Fan Physician 59:113-118, 125-126.
[1390] 39 Dreensen (1997) Vaccine 15 Suppl″ S2-6.
[1391] 40 MMWR Morb Mortal Wkly rep 1998 Jan. 16: 47(1):12, 9.
[1392] 41 McMichael (2000) Vaccine 19 Suppl 1: S101-107.
[1393] 42 Schuchat (1999) Lancer 353(9146):51-6.
[1394] 43 GB patent applications 0026333.5, 0028727.6 & 0105640.7.
[1395] 44 Dale (1999) Infect Disclin North Am 13:227-43, viii.
[1396] 45 Ferretti et al. (2001) PNAS USA 98: 4658-4663.
[1397] 46 Kuroda et al. (2001) Lancet 357(9264):1225-1240; see also pages 1218-1219.
[1398] 47 Ramsay et al. (2001) Lancet 357(9251): 195-196.
[1399] 48 Lindberg (1999) Vaccine 17 Suppl 2:S28-36.
[1400] 49 Buttery & Moxon (2000) J R Coil Physicians Long 34:163-168.
[1401] 50 Ahmad & Chapnick (1999) Infect Dis Clin North Am 13:113-133, vii.
[1402] 51 Goldblatt (1998) J. Med. Microbiol. 47:663-567.
[1403] 52 European patent 0 477 508.
[1404] 53 U.S. Pat. No. 5,306,492.
[1405] 54 International patent application WO98/42721.
[1406] 55 Conjugate Vaccines (eds. Cruse et al.) ISBN 3805549326, particularly vol. 10:48-114.
[1407] 56 Hermanson (1996) Bioconjugate Techniques ISBN: 012323368 & 012342335X.
[1408] 57 European patent application 0372501.
[1409] 58 European patent application 0378881.
[1410] 59 European patent application 0427347.
[1411] 60 International patent application WO93/17712.
[1412] 61 International patent application WO98/58668.
[1413] 62 European patent application 0471177.
[1414] 63 International patent application WO00/56360.
[1415] 64 International patent application WO00/67161.

[1416] The contents of all of the above cited patents, patent applications and journal articles are incorporated by reference as if set forth fully herein.

[1417] There may be an upper limit to the number of Gram positive bacterial proteins which will be in the compositions of the invention. Preferably, the number of Gram positive bacterial proteins in a composition of the invention is less than 20, less than 19, less than 18, less than 17, less than 16, less than 15, less than 14, less than 13, less than 12, less than 11, less than 10, less than 9, less than 8, less than 7, less than 6, less than 5, less than 4, or less than 3. Still more preferably, the number of Gram positive bacterial proteins in a composition of the invention is less than 6, less than 5, or less than 4. Still more preferably, the number of Gram positive bacterial proteins in a composition of the invention is 3.

[1418] The Gram positive bacterial proteins and polynucleotides used in the invention are preferably isolated, i.e., separate and discrete, from the whole organism with which the molecule is found in nature or, when the polynucleotide or polypeptide is not found in nature, is sufficiently free of other biological macromolecules so that the polynucleotide or polypeptide can be used for its intended purpose.

Fusion Proteins: GBS AI Sequences

[1419] The GBS AI proteins used in the invention may be present in the composition as individual separate polypeptides, but it is preferred that at least two (i.e. 2, 3, 4, 5, 6, 7, 8, 9, 10, 11, 12, 13, 14, 15, 16, 17, or 18) of the antigens are expressed as a single polypeptide chain (a “hybrid” or “fusion” polypeptide). Such fusion polypeptides offer two principal advantages: first, a polypeptide that may be unstable or poorly expressed on its own can be assisted by adding a suitable fusion partner that overcomes the problem; second, commercial manufacture is simplified as only one expression and purification need be employed in order to produce two polypeptides which are both antigenically useful.

[1420] The fusion polypeptide may comprise one or more AI polypeptide sequences. Preferably, the fusion comprises an AI surface protein sequence. Preferably, the fusion polypeptide includes one or more of GBS 80, GBS 104, and GBS 67. Most preferably, the fusion peptide includes a polypeptide sequence from GBS 80. Accordingly, the invention includes a fusion peptide comprising a first amino acid sequence and a second amino acid sequence, wherein said first and second amino acid sequences are selected from a GBS AI surface protein or a fragment thereof. Preferably, the first and second amino acid sequences in the fusion polypeptide comprise different epitopes.

[1421] Hybrids (or fusions) consisting of amino acid sequences from two, three, four, five, six, seven, eight, nine, or ten GBS antigens are preferred. In particular, hybrids consisting of amino acid sequences from two, three, four, or five GBS antigens are preferred.

[1422] Different hybrid polypeptides may be mixed together in a single formulation. Within such combinations, a GBS antigen may be present in more than one hybrid polypeptide and/or as a non-hybrid polypeptide. It is preferred, however, that an antigen is present either as a hybrid or as a non-hybrid, but not as both.

[1423] Hybrid polypeptides can be represented by the formula NH₂-A-{-X-L-}ₙ-B—COOH, wherein: X is an amino acid sequence of a GBS AI protein or a fragment thereof; L is an optional linker amino acid sequence; A is an optional N-terminal amino acid sequence; B is an optional C-terminal amino acid sequence; and n is 2, 3, 4, 5, 6, 7, 8, 9, 10, 11, 12, 13, 14 or 15.

[1424] If a —X— moiety has a leader peptide sequence in its wild-type form, this may be included or omitted in the hybrid protein. In some embodiments, the leader peptides will be deleted except for that of the —X— moiety located at the N-terminus of the hybrid protein i.e. the leader peptide of X₁ will be retained, but the leader peptides of X₂ . . . Xₙ will be omitted. This is equivalent to deleting all leader peptides and using the leader peptide of X₁ as moiety -A-.

[1425] For each n instances of {-X-L-}, linker amino acid sequence -L- may be present or absent. For instance, when n=2 the hybrid may be NH₂—X₁-L₁-X₂-L₂-COOH, NH₂—X₁—X₂—COOH, NH₂—X₁-L₁-X₂—COOH, NH₂—X₁—X₂-L₂-COOH, etc. Linker amino acid sequence(s) -L- will typically be short (e.g. 20 or fewer amino acids i.e. 19, 18, 17, 16, 15, 14, 13, 12, 11, 10, 9, 8, 7, 6, 5, 4, 3, 2, 1). Examples comprise short peptide sequences which facilitate cloning, poly-glycine linkers (i.e. comprising Glyₙ where n=2, 3, 4, 5, 6, 7, 8, 9, 10 or more), and histidine tags (i.e. Hisₙ where n=3, 4, 5, 6, 7, 8, 9, 10 or more). Other suitable linker amino acid sequences will be apparent to those skilled in the art. A useful linker is GSGGGG, with the Gly-Ser dipeptide being formed from a BamHI restriction site, thus aiding cloning and manipulation, and the (Gly)₄ tetrapeptide being a typical poly-glycine linker.

[1426] -A- is an optional N-terminal amino acid sequence. This will typically be short (e.g. 40 or fewer amino acids i.e. 39, 38, 37, 36, 35, 34, 33, 32, 31, 30, 29, 28, 27, 26, 25, 24, 23, 22, 21, 20, 19, 18, 17, 16, 15, 14, 13, 12, 11, 10, 9, 8, 7, 6, 5, 4, 3, 2, 1). Examples include leader sequences to direct protein trafficking, or short peptide sequences which facilitate cloning or purification (e.g. histidine tags i.e. Hisₙ where n=3, 4, 5, 6, 7, 8, 9, 10 or more). Other suitable N-terminal amino acid sequences will be apparent to those skilled in the art. If X₁ lacks its own N-terminus methionine, -A- is preferably an oligopeptide (e.g. with 1, 2, 3, 4, 5, 6, 7 or 8 amino acids) which provides a N-terminus methionine.

[1427] —B— is an optional C-terminal amino acid sequence. This will typically be short (e.g. 40 or fewer amino acids i.e. 39, 38, 37, 36, 35, 34, 33, 32, 31, 30, 29, 28, 27, 26, 25, 24, 23, 22, 21, 20, 19, 18, 17, 16, 15, 14, 13, 12, 11, 10, 9, 8, 7, 6, 5, 4, 3, 2, 1). Examples include sequences to direct protein trafficking, short peptide sequences which facilitate cloning or purification (e.g. comprising histidine tags i.e. Hisₙ, where n=3, 4, 5, 6, 7, 8, 9, 10 or more), or sequences which enhance protein stability. Other suitable C-terminal amino acid sequences will be apparent to those skilled in the art.

[1428] Most preferably, n is 2 or 3.

Fusion Proteins: Gram Positive Bacteria AI Sequences

[1429] The Gram positive bacteria AI proteins used in the invention may be present in the composition as individual separate polypeptides, but it is preferred that at least two (i.e. 2, 3, 4, 5, 6, 7, 8, 9, 10, 11, 12, 13, 14, 15, 16, 17, or 18) of the antigens are expressed as a single polypeptide chain (a “hybrid” or “fusion” polypeptide). Such fusion polypeptides offer two principal advantages: first, a polypeptide that may be unstable or poorly expressed on its own can be assisted by adding a suitable fusion partner that overcomes the problem; second, commercial manufacture is simplified as only one expression and purification need be employed in order to produce two polypeptides which are both antigenically useful.

[1430] The fusion polypeptide may comprise one or more AI polypeptide sequences. Preferably, the fusion comprises an AI surface protein sequence. Accordingly, the invention includes a fusion peptide comprising a first amino acid sequence and a second amino acid sequence, wherein said first and second amino acid sequences are selected from a Gram positive bacteria AI protein or a fragment thereof. Preferably, the first and second amino acid sequences in the fusion polypeptide comprise different epitopes.

[1431] Hybrids (or fusions) consisting of amino acid sequences from two, three, four, five, six, seven, eight, nine, or ten Gram positive bacteria antigens are preferred. In particular, hybrids consisting of amino acid sequences from two, three, four, or five Gram positive bacteria antigens are preferred.

[1432] Different hybrid polypeptides may be mixed together in a single formulation. Within such combinations, a Gram positive bacteria AI sequence may be present in more than one hybrid polypeptide and/or as a non-hybrid polypeptide. It is preferred, however, that an antigen is present either as a hybrid or as a non-hybrid, but not as both.

[1433] Hybrid polypeptides can be represented by the formula NH₂-A-{-X-L-}ₙ-B—COOH, wherein: X is an amino acid sequence of a Gram positive bacteria AI sequence or a fragment thereof; L is an optional linker amino acid sequence; A is an optional N-terminal amino acid sequence; B is an optional C-terminal amino acid sequence; and n is 2, 3, 4, 5, 6, 7, 8, 9, 10, 11, 12, 13, 14 or 15.

[1434] If a —X— moiety has a leader peptide sequence in its wild-type form, this may be included or omitted in the hybrid protein. In some embodiments, the leader peptides will be deleted except for that of the —X— moiety located at the N-terminus of the hybrid protein i.e. the leader peptide of X₁ will be retained, but the leader peptides of X₂ . . . Xₙ will be omitted. This is equivalent to deleting all leader peptides and using the leader peptide of X₁ as moiety -A-.

[1435] For each n instances of {—X-L-}, linker amino acid sequence -L- may be present or absent. For instance, when n=2 the hybrid may be NH₂—X₁-L₁-X₂-L₂-COOH, NH₂—X₁—X₂—COOH, NH₂—X₁-L₁-X₂—COOH, NH₂—X₁—X₂-L₂-COOH, etc. Linker amino acid sequence(s) -L- will typically be short (e.g. 20 or fewer amino acids i.e. 19, 18, 17, 16, 15, 14, 13, 12, 11, 10, 9, 8, 7, 6, 5, 4, 3, 2, 1). Examples comprise short peptide sequences which facilitate cloning, poly-glycine linkers (i.e. comprising Glyₙ, where n=2, 3, 4, 5, 6, 7, 8, 9, 10 or more), and histidine tags (i.e. Hisₙ where n=3, 4, 5, 6, 7, 8, 9, 10 or more). Other suitable linker amino acid sequences will be apparent to those skilled in the art. A useful linker is GSGGGG, with the Gly-Ser dipeptide being formed from a BamHI restriction site, thus aiding cloning and manipulation, and the (Gly)₄ tetrapeptide being a typical poly-glycine linker.

[1436] -A- is an optional N-terminal amino acid sequence. This will typically be short (e.g. 40 or fewer amino acids i.e. 39, 38, 37, 36, 35, 34, 33, 32, 31, 30, 29, 28, 27, 26, 25, 24, 23, 22, 21, 20, 19, 18, 17, 16, 15, 14, 13, 12, 11, 10, 9, 8, 7, 6, 5, 4, 3, 2, 1). Examples include leader sequences to direct protein trafficking, or short peptide sequences which facilitate cloning or purification (e.g. histidine tags i.e. His, where n=3, 4, 5, 6, 7, 8, 9, 10 or more). Other suitable N-terminal amino acid sequences will be apparent to those skilled in the art. If X₁ lacks its own N-terminus methionine, -A- is preferably an oligopeptide (e.g. with 1, 2, 3, 4, 5, 6, 7 or 8 amino acids) which provides a N-terminus methionine.

[1437] —B— is an optional C-terminal amino acid sequence. This will typically be short (e.g. 40 or fewer amino acids i.e. 39, 38, 37, 36, 35, 34, 33, 32, 31, 30, 29, 28, 27, 26, 25, 24, 23, 22, 21, 20, 19, 18, 17, 16, 15, 14, 13, 12, 11, 10, 9, 8, 7, 6, 5, 4, 3, 2, 1). Examples include sequences to direct protein trafficking, short peptide sequences which facilitate cloning or purification (e.g. comprising histidine tags i.e. Hisₙ, where n=3, 4, 5, 6, 7, 8, 9, 10 or more), or sequences which enhance protein stability. Other suitable C-terminal amino acid sequences will be apparent to those skilled in the art.

[1438] Most preferably, n is 2 or 3.

Antibodies: GBS AI Sequences

[1439] The GBS AI proteins of the invention may also be used to prepare antibodies specific to the GBS AI proteins. The antibodies are preferably specific to the an oligomeric or hyper-oligomeric form of an AI protein. The invention also includes combinations of antibodies specific to GBS AI proteins selected to provide protection against an increased range of GBS serotypes and strain isolates. For example, a combination may comprise a first and second antibody, wherein said first antibody is specific to a first GBS AI protein and said second antibody is specific to a second GBS AI protein. Preferably, the nucleic acid sequence encoding said first GBS AI protein is not present in a GBS genome comprising a polynucleotide sequence encoding for said second GBS AI protein. Preferably, the nucleic acid sequence encoding said first and second GBS AI proteins are present in the genomes of multiple GBS serotypes and strain isolates.

[1440] The GBS specific antibodies of the invention include one or more biological moieties that, through chemical or physical means, can bind to or associate with an epitope of a GBS polypeptide. The antibodies of the invention include antibodies which specifically bind to a GBS AI protein. The invention includes antibodies obtained from both polyclonal and monoclonal preparations, as well as the following: hybrid (chimeric) antibody molecules (see, for example, Winter et al. (1991) Nature 349: 293-299; and U.S. Pat. No. 4,816,567; F(ab′)₂ and F(ab) fragments; Fᵥ molecules (non-covalent heterodimers, see, for example, Inbar et al. (1972) Proc Natl Acad Sci USA 69:2659-2662; and Ehrlich et al. (1980) Biochem 19:4091-4096); single-chain Fv molecules (sFv) (see, for example, Huston et al. (1988) Proc Natl Acad Sci USA 85:5897-5883); dimeric and trimeric antibody fragment constructs; minibodies (see, e.g., Pack et al. (1992) Biochem 31:1579-1584; Cumber et al. (1992) J Immunology 149B: 120-126); humanized antibody molecules (see, for example, Riechmann et al. (1988) Nature 332:323-327; Verhoeyan et al. (1988) Science 239:1534-1536; and U.K. Patent Publication No. GB 2,276,169, published 21 Sep. 1994); and, any functional fragments obtained from such molecules, wherein such fragments retain immunological binding properties of the parent antibody molecule. The invention further includes antibodies obtained through non-conventional processes, such as phage display.

[1441] Preferably, the GBS specific antibodies of the invention are monoclonal antibodies. Monoclonal antibodies of the invention include an antibody composition having a homogeneous antibody population. Monoclonal antibodies of the invention may be obtained from murine hybridomas, as well as human monoclonal antibodies obtained using human rather than murine hybridomas. See, e.g., Cote, et al. Monoclonal Antibodies and Cancer Therapy, Alan R. Liss, 1985, p 77.

[1442] The antibodies of the invention may be used in diagnostic applications, for example, to detect the presence or absence of GBS in a biological sample. The antibodies of the invention may also be used in the prophylactic or therapeutic treatment of GBS infection.

Antibodies: Gram Positive Bacteria AI Sequences

[1443] The Gram positive bacteria AI proteins of the invention may also be used to prepare antibodies specific to the Gram positive bacteria AI proteins. The antibodies are preferably specific to the an oligomeric or hyper-oligomeric form of an AI protein. The invention also includes combinations of antibodies specific to Gram positive bacteria AI proteins selected to provide protection against an increased range of Gram positive bacteria genus, species, serotypes and strain isolates.

[1444] For example, a combination may comprise a first and second antibody, wherein said first antibody is specific to a first Gram positive bacteria AI protein and said second antibody is specific to a second Gram positive bacteria AI protein. Preferably, the nucleic acid sequence encoding said first Gram positive bacteria AI protein is not present in a Gram positive bacterial genome comprising a polynucleotide sequence encoding for said second Gram positive bacteria AI protein. Preferably, the nucleic acid sequence encoding said first and second Gram positive bacteria AI proteins are present in the genomes of multiple Gram positive bacteria genus, species, serotypes or strain isolates.

[1445] As an example of an instance where the combination of antibodies provides protection against an increased range of bacteria serotypes, the first antibody may be specific to a first GAS AI protein and the second antibody may be specific to a second GAS AI protein. The first GAS AI protein may comprise a GAS AI-1 surface protein, while the second GAS AI protein may comprise a GAS AI-2 or AI-3 surface protein.

[1446] As an example of an instance where the combination of antibodies provides protection against an increased range of bacterial species, the first antibody may be specific to a GBS AI protein and the second antibody may be specific to a GAS AI protein. Alternatively, the first antibody may be specific to a GAS AI protein and the second antibody may be specific to a S. pneumoniae AI protein.

[1447] The Gram positive specific antibodies of the invention include one or more biological moieties that, through chemical or physical means, can bind to or associate with an epitope of a Gram positive bacteria AI polypeptide. The antibodies of the invention include antibodies which specifically bind to a Gram positive bacteria AI protein. The invention includes antibodies obtained from both polyclonal and monoclonal preparations, as well as the following: hybrid (chimeric) antibody molecules (see, for example, Winter et al. (1991) Nature 349: 293-299; and U.S. Pat. No. 4,816,567; F(ab′)₂ and F(ab) fragments; Fᵥ molecules (non-covalent heterodimers, see, for example, Inbar et al. (1972) Proc Natl Acad Sci USA 69:2659-2662; and Ehrlich et al. (1980) Biochem 19:4091_{—}4096); single-chain Fv molecules (sFv) (see, for example, Huston et al. (1988) Proc Natl Acad Sci USA 85:5897-5883); dimeric and trimeric antibody fragment constructs; minibodies (see, e.g., Pack et al. (1992) Biochem 31:1579-1584; Cumber et al. (1992) J Immunology 149B: 120-126); humanized antibody molecules (see, for example, Riechmann et al. (1988) Nature 332:323-327; Verhoeyan et al. (1988) Science 239:1534-1536; and U.K. Patent Publication No. GB 2,276,169, published 21 Sep. 1994); and, any functional fragments obtained from such molecules, wherein such fragments retain immunological binding properties of the parent antibody molecule. The invention further includes antibodies obtained through non-conventional processes, such as phage display.

[1448] Preferably, the Gram positive specific antibodies of the invention are monoclonal antibodies. Monoclonal antibodies of the invention include an antibody composition having a homogeneous antibody population. Monoclonal antibodies of the invention may be obtained from murine hybridomas, as well as human monoclonal antibodies obtained using human rather than murine hybridomas. See, e.g., Cote, et al. Monoclonal Antibodies and Cancer Therapy, Alan R. Liss, 1985, p 77.

[1449] The antibodies of the invention may be used in diagnostic applications, for example, to detect the presence or absence of Gram positive bacteria in a biological sample. The antibodies of the invention may also be used in the prophylactic or therapeutic treatment of Gram positive bacteria infection.

Nucleic Acids

[1450] The invention provides nucleic acids encoding the Gram positive bacteria sequences and/or the hybrid fusion polypeptides of the invention. The invention also provides nucleic acid encoding the GBS antigens and/or the hybrid fusion polypeptides of the invention. Furthermore, the invention provides nucleic acid which can hybridise to these nucleic acids, preferably under “high stringency” conditions (e.g. 65° C. in a 0.1×SSC, 0.5% SDS solution).

[1451] Polypeptides of the invention can be prepared by various means (e.g. recombinant expression, purification from cell culture, chemical synthesis, etc.) and in various forms (e.g. native, fusions, non-glycosylated, lipidated, etc.). They are preferably prepared in substantially pure form (i.e. substantially free from other GAS or host cell proteins).

[1452] Nucleic acid according to the invention can be prepared in many ways (e.g. by chemical synthesis, from genomic or cDNA libraries, from the organism itself, etc.) and can take various forms (e.g. single stranded, double stranded, vectors, probes, etc.). They are preferably prepared in substantially pure form (i.e. substantially free from other GBS or host cell nucleic acids).

[1453] The term “nucleic acid” includes DNA and RNA, and also their analogues, such as those containing modified backbones (e.g. phosphorothioates, etc.), and also peptide nucleic acids (PNA), etc. The invention includes nucleic acid comprising sequences complementary to those described above (e.g. for antisense or probing purposes).

[1454] The invention also provides a process for producing a polypeptide of the invention, comprising the step of culturing a host cell transformed with nucleic acid of the invention under conditions which induce polypeptide expression.

[1455] The invention provides a process for producing a polypeptide of the invention, comprising the step of synthesising at least part of the polypeptide by chemical means.

[1456] The invention provides a process for producing nucleic acid of the invention, comprising the step of amplifying nucleic acid using a primer-based amplification method (e.g. PCR).

[1457] The invention provides a process for producing nucleic acid of the invention, comprising the step of synthesising at least part of the nucleic acid by chemical means.

Purification and Recombinant Expression

[1458] The Gram positive bacteria AI proteins of the invention may be isolated from the native Gram positive bacteria, or they may be recombinantly produced, for instance in a heterologous host. For example, the GAS, GBS, and S. pneumoniae antigens of the invention may be isolated from Streptococcus agalactiae, S. pyogenes, S. pneumoniae, or they may be recombinantly produced, for instance, in a heterologous host. Preferably, the GBS antigens are prepared using a heterologous host.

[1459] The heterologous host may be prokaryotic (e.g. a bacterium) or eukaryotic. It is preferably E. coli, but other suitable hosts include Bacillus subtilis, Vibrio cholerae, Salmonella typhi, Salmonella typhimurium, Neisseria lactamica, Neisseria cinerea, Mycobacteria (e.g. M. tuberculosis), S. gordonii, L. lactis, yeasts, etc.

[1460] Recombinant production of polypeptides is facilitated by adding a tag protein to the Gram positive bacteria AI sequence to be expressed as a fusion protein comprising the tag protein and the Gram positive bacteria antigen. For example, recombinant production of polypeptides is facilitated by adding a tag protein to the GBS antigen to be expressed as a fusion protein comprising the tag protein and the GBS antigen. Such tag proteins can facilitate purification, detection and stability of the expressed protein. Tag proteins suitable for use in the invention include a polyarginine tag (Arg-tag), polyhistidine tag (His-tag), FLAG-tag, Strep-tag, c-myc-tag, S-tag, calmodulin-binding peptide, cellulose-binding domain, SBP-tag, chitin-binding domain, glutathione S-transferase-tag (GST), maltose-binding protein, transcription termination anti-terminiantion factor (NusA), E. coli thioredoxin (TrxA) and protein disulfide isomerase I (DsbA). Preferred tag proteins include His-tag and GST. A full discussion on the use of tag proteins can be found at Terpe et al., “Overview of tag protein fusions: from molecular and biochemical fundamentals to commercial systems”, Appl Microbiol Biotechnol (2003) 60:523-533.

[1461] After purification, the tag proteins may optionally be removed from the expressed fusion protein, i.e., by specifically tailored enzymatic treatments known in the art. Commonly used proteases include enterokinase, tobacco etch virus (TEV), thrombin, and factor Xₐ.

GBS Polysaccharides

[1462] The compositions of the invention may be further improved by including GBS polysaccharides. Preferably, the GBS antigen and the saccharide each contribute to the immunological response in a recipient. The combination is particularly advantageous where the saccharide and polypeptide provide protection from different GBS serotypes.

[1463] The combined antigens may be present as a simple combination where separate saccharide and polypeptide antigens are administered together, or they may be present as a conjugated combination, where the saccharide and polypeptide antigens are covalently linked to each other.

[1464] Thus the invention provides an immunogenic composition comprising (i) one or more GBS AI proteins and (ii) one or more GBS saccharide antigens. The polypeptide and the polysaccharide may advantageously be covalently linked to each other to form a conjugate.

[1465] Between them, the combined polypeptide and saccharide antigens preferably cover (or provide protection from) two or more GBS serotypes (e.g. 2, 3, 4, 5, 6, 7, 8 or more serotypes). The serotypes of the polypeptide and saccharide antigens may or may not overlap. For example, the polypeptide might protect against serogroup II or V, while the saccharide protects against either serogroups Ia, Ib, or III. Preferred combinations protect against the following groups of serotypes: (1) serotypes Ia and Ib, (2) serotypes Ia and H, (3) serotypes Ia and III, (4) serotypes Ia and IV, (5) serotypes Ia and V, (6) serotypes Ia and VI, (7) serotypes Ia and VII, (8) serotypes Ia and VIII, (9) serotypes Ib and II, (10) serotypes Ib and III, (11) serotypes Ib and IV, (12) serotypes Ib and V, (13) serotypes Ib and VI, (14) serotypes Ib and VII, (15) serotypes Ib and VIII, 16) serotypes II and III, (17) serotypes II and IV, (18) serotypes II and V, (19) serotypes II and VI, (20) serotypes H and VII, (21) serotypes II and VII, (22) serotypes III and IV, (23) serotypes III and V, (24) serotypes III and VI, (25) serotypes III and VII, (26) serotypes III and VIII, (27) serotypes IV and V, (28) serotypes IV and VI, (29) serotypes IV and VII, (30) serotypes IV and VIII, (31) serotypes V and VI, (32) serotypes V and VII, (33) serotypes V and VIII, (34) serotypes VI and VII, (35) serotypes VI and VIII, and (36) serotypes VII and VIII.

[1466] Still more preferably, the combinations protect against the following groups of serotypes: (1) serotypes Ia and II, (2) serotypes Ia and V; (3) serotypes Ib and II, (4) serotypes Ib and V, (5) serotypes III and II, and (6) serotypes III and V. Most preferably, the combinations protect against serotypes III and V.

[1467] Protection against serotypes II and V is preferably provided by polypeptide antigens. Protection against serotypes Ia, Ib and/or III may be polypeptide or saccharide antigens.

Immunogenic Compositions and Medicaments

[1468] Compositions of the invention are preferably immunogenic compositions, and are more preferably vaccine compositions. The pH of the composition is preferably between 6 and 8, preferably about 7. The pH may be maintained by the use of a buffer. The composition may be sterile and/or pyrogen-free. The composition may be isotonic with respect to humans.

[1469] Vaccines according to the invention may either be prophylactic (i.e. to prevent infection) or therapeutic (i.e. to treat infection), but will typically be prophylactic. Accordingly, the invention includes a method for the therapeutic or prophylactic treatment of a Gram positive bacteria infection in an animal susceptible to such gram positive bacterial infection comprising administering to said animal a therapeutic or prophylactic amount of the immunogenic composition of the invention. For example, the invention includes a method for the therapeutic or prophylactic treatment of a Streptococcus agalactiae, S. pyogenes, or S. pneumoniae infection in an animal susceptible to streptococcal infection comprising administering to said animal a therapeutic or prophylactic amount of the immunogenic compositions of the invention.

[1470] The invention also provides a composition of the invention for use of the compositions described herein as a medicament. The medicament is preferably able to raise an immune response in a mammal (i.e. it is an immunogenic composition) and is more preferably a vaccine.

[1471] The invention also provides the use of the compositions of the invention in the manufacture of a medicament for raising an immune response in a mammal. The medicament is preferably a vaccine.

[1472] The invention also provides kits comprising one or more containers of compositions of the invention. Compositions can be in liquid form or can be lyophilized, as can individual antigens. Suitable containers for the compositions include, for example, bottles, vials, syringes, and test tubes. Containers can be formed from a variety of materials, including glass or plastic. A container may have a sterile access port (for example, the container may be an intravenous solution bag or a vial having a stopper pierceable by a hypodermic injection needle). The composition may comprise a first component comprising one or more Gram positive bacteria AI proteins. Preferably, the AI proteins are surface AI proteins. Preferably, the AI surface proteins are in an oligomeric or hyperoligomeric form. For example, the first component comprises a combination of GBS antigens or GAS antigens, or S. pneumoniae antigens. Preferably said combination includes GBS 80. Preferably GBS 80 is present in an oligomeric or hyperoligomeric form.

[1473] The kit can further comprise a second container comprising a pharmaceutically-acceptable buffer, such as phosphate-buffered saline, Ringer's solution, or dextrose solution. It can also contain other materials useful to the end-user, including other buffers, diluents, filters, needles, and syringes. The kit can also comprise a second or third container with another active agent, for example an antibiotic.

[1474] The kit can also comprise a package insert containing written instructions for methods of inducing immunity against S agalactiae and/or S. pyogenes and/or S pneumoniae or for treating S agalactiae and/or S. pyogenes and/or S pneumoniae infections. The package insert can be an unapproved draft package insert or can be a package insert approved by the Food and Drug Administration (FDA) or other regulatory body.

[1475] The invention also provides a delivery device pre-filled with the immunogenic compositions of the invention.

[1476] The invention also provides a method for raising an immune response in a mammal comprising the step of administering an effective amount of a composition of the invention. The immune response is preferably protective and preferably involves antibodies and/or cell-mediated immunity. This immune response will preferably induce long lasting (e.g., neutralising) antibodies and a cell mediated immunity that can quickly respond upon exposure to one or more GBS and/or GAS and/or S. pneumoniae antigens. The method may raise a booster response.

[1477] The invention provides a method of neutralizing GBS, GAS, or S. pneumoniae infection in a mammal comprising the step of administering to the mammal an effective amount of the immunogenic compositions of the invention, a vaccine of the invention, or antibodies which recognize an immunogenic composition of the invention.

[1478] The mammal is preferably a human. Where the vaccine is for prophylactic use, the human is preferably a female (either of child bearing age or a teenager). Alternatively, the human may be elderly (e.g., over the age of 50, 55, 60, 65, 70 or 75) and may have an underlying disease such as diabetes or cancer. Where the vaccine is for therapeutic use, the human is preferably a pregnant female or an elderly adult.

[1479] These uses and methods are preferably for the prevention and/or treatment of a disease caused by Streptococcus agalactiae, or S. pyogenes, or S. pneumoniae. The compositions may also be effective against other streptococcal bacteria. The compositions may also be effective against other Gram positive bacteria.

[1480] One way of checking efficacy of therapeutic treatment involves monitoring Gram positive bacterial infection after administration of the composition of the invention. One way of checking efficacy of prophylactic treatment involves monitoring immune responses against the Gram positive bacterial antigens in the compositions of the invention after administration of the composition.

[1481] One way of checking efficacy of therapeutic treatment involves monitoring GBS infection after administration of the composition of the invention. One way of checking efficacy of prophylactic treatment involves monitoring immune responses against the GBS antigens in the compositions of the invention after administration of the composition.

[1482] A way of assessing the immunogenicity of the component proteins of the immunogenic compositions of the present invention is to express the proteins recombinantly and to screen patient sera or mucosal secretions by immunoblot. A positive reaction between the protein and the patient serum indicates that the patient has previously mounted an immune response to the protein in question—that is, the protein is an immunogen. This method may also be used to identify immunodominant proteins and/or epitopes.

[1483] Another way of checking efficacy of therapeutic treatment involves monitoring GBS or GAS or S pneumoniae infection after administration of the compositions of the invention. One way of checking efficacy of prophylactic treatment involves monitoring immune responses both systemically (such as monitoring the level of IgG1 and IgG2a production) and mucosally (such as monitoring the level of IgA production) against the GBS and/or GAS and/or S pneumoniae antigens in the compositions of the invention after administration of the composition. Typically, GBS and/or GAS and/or S pneumoniae serum specific antibody responses are determined post-immunization but pre-challenge whereas mucosal GBS and/or GAS and/or S pneumoniae specific antibody body responses are determined post-immunization and post-challenge.

[1484] The vaccine compositions of the present invention can be evaluated in in vitro and in vivo animal models prior to host, e.g., human, administration.

[1485] The efficacy of immunogenic compositions of the invention can also be determined in vivo by challenging animal models of GBS and/or GAS and/or S pneumoniae infection, e.g., guinea pigs or mice, with the immunogenic compositions. The immunogenic compositions may or may not be derived from the same serotypes as the challenge serotypes. Preferably the immunnogenic compositions are derivable from the same serotypes as the challenge serotypes. More preferably, the immunogenic composition and/or the challenge serotypes are derivable from the group of GBS and/or GAS and/or S pneumoniae serotypes.

[1486] In vivo efficacy models include but are not limited to: (i) A murine infection model using human GBS and/or GAS and/or S pneumoniae serotypes; (ii) a murine disease model which is a murine model using a mouse-adapted GBS and/or GAS and/or S pneumoniae strain, such as those strains outlined above which is particularly virulent in mice and (iii) a primate model using human GBS or GAS or S pneumoniae isolates.

[1487] The immune response may be one or both of a TH1 immune response and a TH2 response.

[1488] The immune response may be an improved or an enhanced or an altered immune response.

[1489] The immune response may be one or both of a systemic and a mucosal immune response.

[1490] Preferably the immune response is an enhanced system and/or mucosal response.

[1491] An enhanced systemic and/or mucosal immunity is reflected in an enhanced TH1 and/or TH2 immune response. Preferably, the enhanced immune response includes an increase in the production of IgG1 and/or IgG2a and/or IgA Preferably the mucosal immune response is a TH2 immune response. Preferably, the mucosal immune response includes an increase in the production of IgA.

[1492] Activated TH2 cells enhance antibody production and are therefore of value in responding to extracellular infections. Activated TH2 cells may secrete one or more of IL-4, IL-5, IL-6, and IL-10. A TH2 immune response may result in the production of IgG1, IgE, IgA and memory B cells for future protection.

[1493] A TH2 immune response may include one or more of an increase in one or more of the cytokines associated with a TH2 immune response (such as IL-4, IL-5, IL-6 and IL-10), or an increase in the production of IgG1, IgE, IgA and memory B cells. Preferably, the enhanced TH2 immune resonse will include an increase in IgG1 production.

[1494] A TH1 immune response may include one or more of an increase in CTLs, an increase in one or more of the cytokines associated with a TH1 immune response (such as IL-2, IFNγ, and TNFβ, an increase in activated macrophages, an increase in NK activity, or an increase in the production of IgG2a. Preferably, the enhanced TH1 immune response will include an increase in IgG2a production.

[1495] Immunogenic compositions of the invention, in particular, immunogenic composition comprising one or more GAS antigens of the present invention may be used either alone or in combination with other GAS antigens optionally with an immunoregulatory agent capable of eliciting a Th1 and/or Th2 response.

[1496] Compositions of the invention will generally be administered directly to a patient. Certain routes may be favored for certain compositons, as resulting in the generation of a more effective immune response, preferably a CMI response, or as being less likely to induce side effects, or as being easier for administration. Direct delivery may be accomplished by parenteral injection (e.g. subcutaneously, intraperitoneally, intradermally, intravenously, intramuscularly, or to the interstitial space of a tissue), or by rectal, oral (e.g. tablet, spray), vaginal, topical, transdermal (e.g. see WO 99/27961) or transcutaneous (e.g. see WO 02/074244 and WO 02/064162), intranasal (e.g. see WO03/028760), ocular, aural, pulmonary or other mucosal administration.

[1497] The invention may be used to elicit systemic and/or mucosal immunity.

[1498] In one particularly preferred embodiment, the immunogenic composition comprises one or more GBS or GAS or S pneumoniae antigen(s) which elicits a neutralising antibody response and one or more GBS or GAS or S pneumoniae antigen(s) which elicit a cell mediated immune response. In this way, the neutralising antibody response prevents or inhibits an initial GBS or GAS or S pneumoniae infection while the cell-mediated immune response capable of eliciting an enhanced Th1 cellular response prevents further spreading of the GBS or GAS or S pneumoniae infection. Preferably, the immunogenic composition comprises one or more GBS or GAS or S pneumoniae surface antigens and one or more GBS or GAS or S pneumoniae cytoplasmic antigens. Preferably the immunogenic composition comprises one or more GBS or GAS or S pneumoniae surface antigens or the like and one or other antigens, such as a cytoplasmic antigen capable of eliciting a Th1 cellular response.

[1499] Dosage treatment can be a single dose schedule or a multiple dose schedule. Multiple doses may be used in a primary immunisation schedule and/or in a booster immunisation schedule. In a multiple dose schedule the various doses may be given by the same or different routes e.g. a parenteral prime and mucosal boost, a mucosal prime and parenteral boost, etc.

[1500] The compositions of the invention may be prepared in various forms. For example, the compositions may be prepared as injectables, either as liquid solutions or suspensions. Solid forms suitable for solution in, or suspension in, liquid vehicles prior to injection can also be prepared (e.g. a lyophilised composition). The composition may be prepared for topical administration e.g. as an ointment, cream or powder. The composition may be prepared for oral administration e.g. as a tablet or capsule, as a spray, or as a syrup (optionally flavoured). The composition may be prepared for pulmonary administration e.g. as an inhaler, using a fine powder or a spray. The composition may be prepared as a suppository or pessary. The composition may be prepared for nasal, aural or ocular administration e.g. as drops. The composition may be in kit form, designed such that a combined composition is reconstituted just prior to administration to a patient. Such kits may comprise one or more antigens in liquid form and one or more lyophilised antigens.

[1501] Immunogenic compositions used as vaccines comprise an immunologically effective amount of antigen(s), as well as any other components, such as antibiotics, as needed. By ‘immunologically effective amount’, it is meant that the administration of that amount to an individual, either in a single dose or as part of a series, is effective for treatment or prevention, or increases a measurable immune response or prevents or reduces a clinical symptom. This amount varies depending upon the health and physical condition of the individual to be treated, age, the taxonomic group of individual to be treated (e.g. non-human primate, primate, etc.), the capacity of the individual's immune system to synthesise antibodies, the degree of protection desired, the formulation of the vaccine, the treating doctor's assessment of the medical situation, and other relevant factors. It is expected that the amount will fall in a relatively broad range that can be determined through routine trials.

Further Components of the Composition

[1502] The composition of the invention will typically, in addition to the components mentioned above, comprise one or more ‘pharmaceutically acceptable carriers’, which include any carrier that does not itself induce the production of antibodies harmful to the individual receiving the composition. Suitable carriers are typically large, slowly metabolised macromolecules such as proteins, polysaccharides, polylactic acids, polyglycolic acids, polymeric amino acids, amino acid copolymers, and lipid aggregates (such as oil droplets or liposomes). Such carriers are well known to those of ordinary skill in the art. The vaccines may also contain diluents, such as water, saline, glycerol, etc. Additionally, auxiliary substances, such as wetting or emulsifying agents, pH buffering substances, and the like, may be present. A thorough discussion of pharmaceutically acceptable excipients is available in Gennaro (2000) Remington: The Science and Practice of Pharmacy. 20th ed., ISBN: 0683306472.

Adjuvants

[1503] Vaccines of the invention may be administered in conjunction with other immunoregulatory agents. In particular, compositions will usually include an adjuvant. Adjuvants for use with the invention include, but are not limited to, one or more of the following set forth below:

[1504] A. Mineral Containing Compositions

[1505] Mineral containing compositions suitable for use as adjuvants in the invention include mineral salts, such as aluminum salts and calcium salts. The invention includes mineral salts such as hydroxides (e.g. oxyhydroxides), phosphates (e.g. hydroxyphosphates, orthophosphates), sulfates, etc. (e.g. see chapters 8 & 9 of Vaccine Design . . . (1995) eds. Powell & Newman. ISBN: 030644867X. Plenum.), or mixtures of different mineral compounds (e.g. a mixture of a phosphate and a hydroxide adjuvant, optionally with an excess of the phosphate), with the compounds taking any suitable form (e.g. gel, crystalline, amorphous, etc.), and with adsorption to the salt(s) being preferred. The mineral containing compositions may also be formulated as a particle of metal salt (WO 00/23105).

[1506] Aluminum salts may be included in vaccines of the invention such that the dose of Al³⁺ is between 0.2 and 1.0 mg per dose.

[1507] B. Oil-Emulsions

[1508] Oil-emulsion compositions suitable for use as adjuvants in the invention include squalene-water emulsions, such as MF59 (5% Squalene, 0.5% Tween 80, and 0.5% Span 85, formulated into submicron particles using a microfluidizer). See WO90/14837. See also, Podda, “The adjuvanted influenza vaccines with novel adjuvants: experience with the MF59-adjuvanted vaccine”, Vaccine (2001) 19: 2673-2680; Frey et al., “Comparison of the safety, tolerability, and immunogenicity of a MF59-adjuvanted influenza vaccine and a non-adjuvanted influenza vaccine in non-elderly adults”, Vaccine (2003) 21:42344237. MF59 is used as the adjuvant in the FLUAD™ influenza virus trivalent subunit vaccine.

[1509] Particularly preferred adjuvants for use in the compositions are submicron oil-in-water emulsions. Preferred submicron oil-in-water emulsions for use herein are squalene/water emulsions optionally containing varying amounts of MTP-PE, such as a submicron oil-in-water emulsion containing 4-5% w/v squalene, 0.25-1.0% w/v Tween 80™ (polyoxyelthylenesorbitan monooleate), and/or 0.25-1.0% Span85™ (sorbitan trioleate), and, optionally, N-acetylmuramyl-L-alanyl-D-isogluatminyl-L-alanine-2-(1′-2′-dipalmitoyl-sn-glycero-3-huydroxyphosphophoryloxy)-ethylamine (MTP-PE), for example, the submicron oil-in-water emulsion known as “MF59” (International Publication No. WO 90/14837; U.S. Pat. Nos. 6,299,884 and 6,451,325, incorporated herein by reference in their entireties; and Ott et al., “MF59—Design and Evaluation of a Safe and Potent Adjuvant for Human Vaccines” in Vaccine Design: The Subunit and Adjuvant Approach (Powell, M. F. and Newman, M. J. eds.) Plenum Press, New York, 1995, pp. 277-296). MF59 contains 4-5% w/v Squalene (e.g. 4.3%), 0.25-0.5% w/v Tween 80™, and 0.5% w/v Span 85™ and optionally contains various amounts of MTP-PE, formulated into submicron particles using a microfluidizer such as Model 110Y microfluidizer (Microfluidics, Newton, Mass.). For example, MTP-PE may be present in an amount of about 0-500 μg/dose, more preferably 0-250 μg/dose and most preferably, 0-100 μg/dose. As used herein, the term “MF59-0” refers to the above submicron oil-in-water emulsion lacking MTP-PE, while the term MF59-MTP denotes a formulation that contains MTP-PE. For instance, “MF59-100” contains 100 μg MTP-PE per dose, and so on. MF69, another submicron oil-in-water emulsion for use herein, contains 4.3% w/v squalene, 0.25% w/v Tween 80™, and 0.75% w/v Span 85™ and optionally MTP-PE. Yet another submicron oil-in-water emulsion is MF75, also known as SAF, containing 10% squalene, 0.4% Tween 80™, 5% pluronic-blocked polymer L121, and thr-MDP, also microfluidized into a submicron emulsion. MF75-MTP denotes an MF75 formulation that includes MTP, such as from 100-400 μg MTP-PE per dose.

[1510] Submicron oil-in-water emulsions, methods of making the same and immunostimulating agents, such as muramyl peptides, for use in the compositions, are described in detail in International Publication No. WO 90/14837 and U.S. Pat. Nos. 6,299,884 and 6,451,325, incorporated herein by reference in their entireties.

[1511] Complete Freund's adjuvant (CFA) and incomplete Freund's adjuvant (IFA) may also be used as adjuvants in the invention.

[1512] C. Saponin Formulations

[1513] Saponin formulations, may also be used as adjuvants in the invention. Saponins are a heterologous group of sterol glycosides and triterpenoid glycosides that are found in the bark, leaves, stems, roots and even flowers of a wide range of plant species. Saponin from the bark of the Quillaia saponaria Molina tree have been widely studied as adjuvants. Saponin can also be commercially obtained from Smilax ornata (sarsaprilla), Gypsophilla paniculata (brides veil), and Saponaria officianalis (soap root). Saponin adjuvant formulations include purified formulations, such as QS21, as well as lipid formulations, such as ISCOMs.

[1514] Saponin compositions have been purified using High Performance Thin Layer Chromatography (HP-LC) and Reversed Phase High Performance Liquid Chromatography (RP-HPLC). Specific purified fractions using these techniques have been identified, including QS7, QS17, QS18, QS21, QH-A, QH-B and QH-C. Preferably, the saponin is QS21. A method of production of QS21 is disclosed in U.S. Pat. No. 5,057,540. Saponin formulations may also comprise a sterol, such as cholesterol (see WO96/33739).

[1515] Combinations of saponins and cholesterols can be used to form unique particles called Immunostimulating Complexs (ISCOMs). ISCOMs typically also include a phospholipid such as phosphatidylethanolamine or phosphatidylcholine. Any known saponin can be used in ISCOMs. Preferably, the ISCOM includes one or more of Quil A, QHA and QHC. ISCOMs are further described in EP0109942, WO 96/11711 and WO 96/33739. Optionally, the ISCOMS may be devoid of additional detergent. See WO 00/07621.

[1516] A review of the development of saponin based adjuvants can be found at Barr, et al., “ISCOMs and other saponin based adjuvants”, Advanced Drug Delivery Reviews (1998) 32:247-271. See also Sjolander, et al., “Uptake and adjuvant activity of orally delivered saponin and ISCOM vaccines”, Advanced Drug Delivery Reviews (1998) 32:321-338.

[1517] D. Virosomes and Virus Like Particles (VLPs)

[1518] Virosomes and Virus Like Particles (VLPs) can also be used as adjuvants in the invention. These structures generally contain one or more proteins from a virus optionally combined or formulated with a phospholipid. They are generally non-pathogenic, non-replicating and generally do not contain any of the native viral genome. The viral proteins may be recombinantly produced or isolated from whole viruses. These viral proteins suitable for use in virosomes or VLPs include proteins derived from influenza virus (such as HA or NA), Hepatitis B virus (such as core or capsid proteins), Hepatitis E virus, measles virus, Sindbis virus, Rotavirus, Foot-and-Mouth Disease virus, Retrovirus, Norwalk virus, human Papilloma virus, HIV, RNA-phages, Qβ-phage (such as coat proteins), GA-phage, fr-phage, AP205 phage, and Ty (such as retrotransposon Ty protein p1). VLPs are discussed further in WO 03/024480, WO 03/024481, and Niikura et al., “Chimeric Recombinant Hepatitis E Virus-Like Particles as an Oral Vaccine Vehicle Presenting Foreign Epitopes”, Virology (2002) 293:273-280; Lenz et al., “Papillomarivurs-Like Particles Induce Acute Activation of Dendritic Cells”, Journal of Immunology (2001) 5246-5355; Pinto, et al., “Cellular Immune Responses to Human Papillomavirus (HPV)-16 L1 Healthy Volunteers Immunized with Recombinant HPV-16 L1 Virus-Like Particles”, Journal of Infectious Diseases (2003) 188:327-338; and Gerber et al., “Human Papillomavrisu Virus-Like Particles Are Efficient Oral Immunogens when Coadministered with Escherichia coli Heat-Labile Entertoxin Mutant R192G or CpG”, Journal of Virology (2001) 75(10):4752-4760. Virosomes are discussed further in, for example, Gluck et al., “New Technology Platforms in the Development of Vaccines for the Future”, Vaccine (2002) 20:B10-B16. Immunopotentiating reconstituted influenza virosomes (IRIV) are used as the subunit antigen delivery system in the intranasal trivalent IFLEXAL™ product {Mischler & Metcalfe (2002) Vaccine 20 Suppl 5:B17-23} and the INFLUVAC PLUS™ product.

[1519] E. Bacterial or Microbial Derivatives

[1520] Adjuvants suitable for use in the invention include bacterial or microbial derivatives such as:

[1521] (1) Non-Toxic Derivatives of Enterobacterial Lipopolysaccharide (LPS)

[1522] Such derivatives include Monophosphoryl lipid A (MPL) and 3-O-deacylated MPL (3dMPL). 3dMPL is a mixture of 3 De-O-acylated monophosphoryl lipid A with 4, 5 or 6 acylated chains. A preferred “small particle” form of 3 De-O-acylated monophosphoryl lipid A is disclosed in EP 0 689 454. Such “small particles” of 3dMPL are small enough to be sterile filtered through a 0.22 micron membrane (see EP 0 689 454). Other non-toxic LPS derivatives include monophosphoryl lipid A mimics, such as aminoalkyl glucosaminide phosphate derivatives e.g. RC-529. See Johnson et al. (1999) Bioorg Med Chem Lett 9:2273-2278.

[1523] (2) Lipid A Derivatives

[1524] Lipid A derivatives include derivatives of lipid A from Escherichia coli such as OM-174. OM-174 is described for example in Meraldi et al., “OM-174, a New Adjuvant with a Potential for Human Use, Induces a Protective Response with Administered with the Synthetic C-Terminal Fragment 242-310 from the circumsporozoite protein of Plasmodium berghei”, Vaccine (2003) 21:2485-2491; and Pajak, et al., “The Adjuvant OM-174 induces both the migration and maturation of murine dendritic cells in vivo”, Vaccine (2003) 21:836-842.

[1525] (3) Immunostimulatory Oligonucleotides

[1526] Immunostimulatory oligonucleotides suitable for use as adjuvants in the invention include nucleotide sequences containing a CpG motif (a sequence containing an unmethylated cytosine followed by guanosine and linked by a phosphate bond). Bacterial double stranded RNA or oligonucleotides containing palindromic or poly(dG) sequences have also been shown to be immunostimulatory.

[1527] The CpG's can include nucleotide modifications/analogs such as phosphorothioate modifications and can be double-stranded or single-stranded. Optionally, the guanosine may be replaced with an analog such as 2′-deoxy-7-deazaguanosine. See Kandimalla, et al., “Divergent synthetic nucleotide motif recognition pattern: design and development of potent immunomodulatory oligodeoxyribonucleotide agents with distinct cytokine induction profiles”, Nucleic Acids Research (2003) 31(9): 2393-2400; WO02/26757 and WO99/62923 for examples of possible analog substitutions. The adjuvant effect of CpG oligonucleotides is further discussed in Krieg, “CpG motifs: the active ingredient in bacterial extracts?”, Nature Medicine (2003) 9(7): 831-835; McCluskie, et al., “Parenteral and mucosal prime-boost immunization strategies in mice with hepatitis B surface antigen and CpG DNA”, FEMS Immunology and Medical Microbiology (2002) 32:179-185; WO98/40100; U.S. Pat. No. 6,207,646; U.S. Pat. No. 6,239,116 and U.S. Pat. No. 6,429,199.

[1528] The CpG sequence may be directed to TLR9, such as the motif GTCGTT or TTCGTT. See Kandimalla, et al., “Toll-like receptor 9: modulation of recognition and cytokine induction by novel synthetic CpG DNAs”, Biochemical Society Transactions (2003) 31 (part 3): 654-658. The CpG sequence may be specific for inducing a Th1 immune response, such as a CpG-A ODN, or it may be more specific for inducing a B cell response, such a CpG-B ODN. CpG-A and CpG-B ODNs are discussed in Blackwell, et al., “CpG-A-Induced Monocyte IFN-gamma-Inducible Protein-10 Production is Regulated by Plasmacytoid Dendritic Cell Derived IFN-alpha”, J. Immunol. (2003) 170(8):4061-4068; Krieg, “From A to Z on CpG”, TRENDS in Immunology (2002) 23(2): 64-65 and WO01/95935. Preferably, the CpG is a CpG-A ODN.

[1529] Preferably, the CpG oligonucleotide is constructed so that the 5′ end is accessible for receptor recognition. Optionally, two CpG oligonucleotide sequences may be attached at their 3′ ends to form “immunomers”. See, for example, Kandimalla, et al., “Secondary structures in CpG oligonucleotides affect immunostimulatory activity”, BBRC (2003) 306:948-953; Kandimalla, et al., “Toll-like receptor 9: modulation of recognition and cytokine induction by novel synthetic GpG DNAs”, Biochemical Society Transactions (2003) 31(part 3):664-658; Bhagat et al., “CpG penta- and hexadeoxyribonucleotides as potent immunomodulatory agents” BBRC (2003) 300:853-861 and WO 03/035836.

[1530] (4) ADP-Ribosylating Toxins and Detoxified Derivatives Thereof.

[1531] Bacterial ADP-ribosylating toxins and detoxified derivatives thereof may be used as adjuvants in the invention. Preferably, the protein is derived from E. coli (i.e., E. coli heat labile enterotoxin “LT), cholera (“CT”), or pertussis (“PT”). The use of detoxified ADP-ribosylating toxins as mucosal adjuvants is described in WO95/17211 and as parenteral adjuvants in WO98/42375. Preferably, the adjuvant is a detoxified LT mutant such as LT-K63, LT-R72, and LTR192G. The use of ADP-ribosylating toxins and detoxified derivaties thereof, particularly LT-K63 and LT-R72, as adjuvants can be found in the following references, each of which is specifically incorporated by reference herein in their entirety: Beignon, et al., “The LTR72 Mutant of Heat-Labile Enterotoxin of Escherichia coli Enahnces the Ability of Peptide Antigens to Elicit CD4+ T Cells and Secrete Gamma Interferon after Coapplication onto Bare Skin”, Infection and Immunity (2002) 70(6):3012-3019; Pizza, et al., “Mucosal vaccines: non toxic derivatives of LT and CT as mucosal adjuvants”, Vaccine (2001) 19:2534-2541; Pizza, et al., “LTK63 and LTR72, two mucosal adjuvants ready for clinical trials” Int. J. Med. Microbiol (2000) 290(4-5):455-461; Scharton-Kersten et al., “Transcutaneous Immunization with Bacterial ADP-Ribosylating Exotoxins, Subunits and Unrelated Adjuvants”, Infection and Immunity (2000) 68(9):5306-5313; Ryan et al., “Mutants of Escherichia coli Heat-Labile Toxin Act as Effective Mucosal Adjuvants for Nasal Delivery of an Acellular Pertussis Vaccine: Differential Effects of the Nontoxic AB Complex and Enzyme Activity on Th1 and Th2 Cells” Infection and Immunity (1999) 67(12):6270-6280; Partidos et al., “Heat-labile enterotoxin of Escherichia coli and its site-directed mutant LTK63 enhance the proliferative and cytotoxic T-cell responses to intranasally co-immunized synthetic peptides”, Immunol. Lett. (1999) 67(3):209-216; Peppoloni et al., “Mutants of the Escherichia coli heat-labile enterotoxin as safe and strong adjuvants for intranasal delivery of vaccines”, Vaccines (2003) 2(2):285-293; and Pine et al., (2002) “Intranasal immunization with influenza vaccine and a detoxified mutant of heat labile enterotoxin from Escherichia coli (LTK63)” J. Control Release (2002) 85(1-3):263-270. Numerical reference for amino acid substitutions is preferably based on the alignments of the A and B subunits of ADP-ribosylating toxins set forth in Domenighini et al., Mol. Microbiol (1995) 15(6):1165-1167, specifically incorporated herein by reference in its entirety.

[1532] F. Bioadhesives and Mucoadhesives

[1533] Bioadhesives and mucoadhesives may also be used as adjuvants in the invention. Suitable bioadhesives include esterified hyaluronic acid microspheres (Singh et al. (2001) J. Cont. Rele. 70:267-276) or mucoadhesives such as cross-linked derivatives of poly(acrylic acid), polyvinyl alcohol, polyvinyl pyrollidone, polysaccharides and carboxymethylcellulose. Chitosan and derivatives thereof may also be used as adjuvants in the invention. E.g. WO99/27960.

[1534] G. Microparticles

[1535] Microparticles may also be used as adjuvants in the invention. Microparticles (i.e. a particle of ˜100 nm to ˜150 μm in diameter, more preferably ˜200 nm to ˜30 μm in diameter, and most preferably ˜500 nm to ˜10 μm in diameter) formed from materials that are biodegradable and non-toxic (e.g. a poly(α-hydroxy acid), a polyhydroxybutyric acid, a polyorthoester, a polyanhydride, a polycaprolactone, etc.), with poly(lactide-co-glycolide) are preferred, optionally treated to have a negatively-charged surface (e.g. with SDS) or a positively-charged surface (e.g. with a cationic detergent, such as CTAB).

[1536] H. Liposomes

[1537] Examples of liposome formulations suitable for use as adjuvants are described in U.S. Pat. No. 6,090,406, U.S. Pat. No. 5,916,588, and EP 0 626 169.

[1538] I. Polyoxyethylene Ether and Polyoxyethylene Ester Formulations

[1539] Adjuvants suitable for use in the invention include polyoxyethylene ethers and polyoxyethylene esters. WO99/52549. Such formulations further include polyoxyethylene sorbitan ester surfactants in combination with an octoxynol (WO01/21207) as well as polyoxyethylene alkyl ethers or ester surfactants in combination with at least one additional non-ionic surfactant such as an octoxynol (WO 01/21152).

[1540] Preferred polyoxyethylene ethers are selected from the following group: polyoxyethylene-9-lauryl ether (laureth 9), polyoxyethylene-9-steoryl ether, polyoxytheylene-8-steoryl ether, polyoxyethylene-4-lauryl ether, polyoxyethylene-35-lauryl ether, and polyoxyethylene-23-lauryl ether.

[1541] J. Polyphosphazene (PCPP)

[1542] PCPP formulations are described, for example, in Andrianov et al., “Preparation of hydrogel microspheres by coacervation of aqueous polyphophazene solutions”, Biomaterials (1998) 19(1-3):109-115 and Payne et al., “Protein Release from Polyphosphazene Matrices”, Adv. Drug. Delivery Review (1998) 31(3):185-196.

[1543] K. Muramyl Peptides

[1544] Examples of muramyl peptides suitable for use as adjuvants in the invention include N-acetyl-muramyl-L-threonyl-D-isoglutamine (thr-MDP), N-acetyl-normuramyl-1-alanyl-d-isoglutamine (nor-MDP), and N-acetylmuramyl-1-alanyl-d-isoglutaminyl-1-alanine-2-(1′-2′-dipalmitoyl-sn-glycero-3-hydroxyphosphoryloxy)-ethylamine MTP-PE).

[1545] L. Imidazoquinolone Compounds.

[1546] Examples of imidazoquinolone compounds suitable for use adjuvants in the invention include Imiquamod and its homologues, described further in Stanley, “Imiquimod and the imidazoquinolones: mechanism of action and therapeutic potential” Clin Exp Dermatol (2002) 27(7):571-577 and Jones, “Resiquimod 3M”, Curr Opin Investig Drugs (2003) 4(2):214-218.

[1547] The invention may also comprise combinations of aspects of one or more of the adjuvants identified above. For example, the following adjuvant compositions may be used in the invention:

(1) a saponin and an oil-in-water emulsion (WO 99/11241);

(2) a saponin (e.g., QS21)+a non-toxic LPS derivative (e.g. 3dMPL) (see WO 94/00153);

(3) a saponin (e.g., QS21)+a non-toxic LPS derivative (e.g. 3dMPL)+a cholesterol;

(4) a saponin (e.g. QS21)+3dMPL+IL-12 (optionally+a sterol) (WO 98/57659);

(5) combinations of 3dMPL with, for example, QS21 and/or oil-in-water emulsions (See European patent applications 0835318, 0735898 and 0761231);

(6) SAF, containing 10% Squalane, 0.4% Tween 80, 5% pluronic-block polymer L121, and thr-MDP, either microfluidized into a submicron emulsion or vortexed to generate a larger particle size emulsion.

[1548] (7) Ribi™ adjuvant system (RAS), (Ribi Immunochem) containing 2% Squalene, 0.2% Tween 80, and one or more bacterial cell wall components from the group consisting of monophosphorylipid A (MPL), trehalose dimycolate (TDM), and cell wall skeleton (CWS), preferably MPL+CWS (Detox™);

(8) one or more mineral salts (such as an aluminum salt)+a non-toxic derivative of LPS (such as 3dPML).

(9) one or more mineral salts (such as an aluminum salt)+an immunostimulatory oligonucleotide (such as a nucleotide sequence including a CpG motif). Combination No. (9) is a preferred adjuvant combination.

[1549] M. Human Immunomodulators

[1550] Human immunomodulators suitable for use as adjuvants in the invention include cytokines, such as interleukins (e.g. IL-1, IL-2, IL-4, IL-5, 1L-6, IL-7, IL-12, etc.), interferons (e.g. interferon-γ), macrophage colony stimulating factor, and tumor necrosis factor.

[1551] Aluminum salts and MF59 are preferred adjuvants for use with injectable influenza vaccines. Bacterial toxins and bioadhesives are preferred adjuvants for use with mucosally-delivered vaccines, such as nasal vaccines.

[1552] The immunogenic compositions of the present invention may be administed in combination with an antibiotic treatment regime. In one embodiment, the antibiotic is administered prior to administration of the antigen of the invention or the composition comprising the one or more of the antigens of the invention.

[1553] In another embodiment, the antibiotic is administered subsequent to the adminstration of the one or more antigens of the invention or the composition comprising the one or more antigens of the invention. Examples of antibiotics suitable for use in the treatment of the Steptococcal infections of the invention include but are not limited to penicillin or a derivative thereof or clindamycin or the like.

Further Antigens

[1554] The compositions of the invention may further comprise one or more additional Gram positive bacterial antigens which are not associated with an AI. Preferably, the Gram positive bacterial antigens that are not associated with an AI can provide protection across more than one serotype or strain isolate. For example, a first non-AI antigen, in which the first non-AI antigen is at least 90% (i.e., at least 90, 91, 92, 93, 94, 95, 96, 97, 98, 99, or 100%) homologous to the amino acid sequence of a second non-AI antigen, wherein the first and the second non-AI antigen are derived from the genomes of different serotypes of a Gram positive bacteria, may be further included in the compositions. The first non-AI antigen may also be homologous to the amino acid sequence of a third non-AI antigen, such that the first non-AI antigen, the second non-AI antigen, and the third non-AI antigen are derived from the genomes of different serotypes of a Gram positive bacteria. The first non-AI antigen may also be homologous to the amino acid sequence of a fourth non-AI antigen, such that the first non-AI antigen, the second non-AI antigen, the third non-AI antigen, and the fourth non-AI antigen are derived from the genomes of different serotypes of a Gram positive bacteria.

[1555] The first non-AI antigen may be GBS 322. The amino acid sequence of GBS 322 across GBS strains from serotypes Ia, Ib, II, III, V, and VIII is greater than 90%. Alternatively, the first non-AI antigen may be GBS 276. The amino acid sequence of GBS 276 across GBS strain from serotypes Ia, Ib, II, III, V, and VIII is greater than 90%. Table 13 provides the percent amino acid sequence identity of GBS 322 and GBS 276 across different GBS strains and serotypes.

TABLE 13
Conservation of GBS 322 and GBS 276 amino acid sequences

| | | GBS 322 | | GBS 276 | |
|---|---|---|---|---|---|
| Serotype | Strains | cGH | % AA identity | cGH | % AA identity |
| Ia | 090 | + | 98.60 | + | 97.90 |
| | A909 | + | 98.30 | + | 97.90 |
| | 515 | + | 98.80 | + | 97.50 |
| | DK1 | + | | + | |
| | DK8 | + | | + | |
| | Davis | + | | + | |
| Ib | 7357b | + | | + | |
| | H36B | + | 98.30 | + | 97.80 |
| II | 18RS21 | + | 100.00 | + | 99.90 |
| | DK21 | + | | + | |
| III | NEM316 | + | 100.00 | + | 97.00 |
| | COH31 | + | | + | |
| | D136 | + | | + | |
| | M732 | + | 98.00 | + | 100.00 |
| | COH1 | + | 98.30 | + | 100.00 |
| | M781 | + | 98.30 | + | 99.60 |
| No type | CJB110 | + | 98.60 | + | 97.90 |
| | 1169NT | + | 97.40 | + | 97.90 |
| V | CJB111 | + | 100.00 | + | |
| | 2603 | + | 100.00 | + | 100.00 |
| VIII | JM130013 | + | 100.00 | + | 97.90 |
| | SMU014 | + | | + | |

| | | | | |
|---|---|---|---|---|
| total | 22/22 | 98.28 +/− 0.4 | 22/22 | 98.44 +/− 1.094 |

[1556] As an example, inclusion of a non-AI protein, GBS 322, in combination with AI antigens GBS 67, GBS 80, and GBS 104 provided protection to newborn mice in an active maternal immunization assay.

TABLE 14
Active maternal immunization assay for a combination of fragments from
GBS 322, GBS 80, GBS 104, and GBS 67

| | | | | | MIX = 322 + | | | |
|---|---|---|---|---|---|---|---|---|
| | | FACS (Δ Mean) | | | 80 + 104 + 67 | | PBS | |
| GBS strains | Type | GBS 80 | GBS 67 | GBS 322 | alive/treated | % protection | alive/treated | % protection |
| 515 | Ia | 0 | 409 | 227 | 39/40 | 97 | 6/40 | 15 |
| 7357b- | Ib | 91 | 316 | 102 | 19/30 | 63 | 1/30 | 3 |
| DK21 | II | 0 | 331 | 416 | 25/34 | 73 | 17/48 | 35 |
| 5401 | II | 170 | 618 | 135 | 35/40 | 87 | 3/37 | 8 |
| 3050 | II | 43 | 460 | 188 | 48/48 | 100 | 1/30 | 3 |
| COH1 | III | 305 | 0 | 130 | 36/36 | 100 | 7/40 | 17 |
| M781 | III | 65 | 0 | 224 | 30/40 | 75 | 4/39 | 10 |
| 2603 | V | 125 | 105 | 313 | 27/33 | 82 | 10/35 | 28 |
| CJB111 | V | 370 | 481 | 63 | 25/28 | 89 | 4/46 | 9 |
| JM9130013 | VIII | 597 | 83 | 143 | 37/39 | 95 | 5/40 | 12 |
| JMU071 | VIII | 556 | 79 | 170 | 44/50 | 88 | 18/50 | 36 |
| NT1169 | NT | 0 | 443 | 213 | 12/32 | 37 | 11/35 | 31 |

[1557] In fact, the non-AI GBS 322 antigen may itself provide protection to newborn mice in an active maternal immunization assay.

TABLE 16
Active maternal immunization assay for each of
GBS 80 and GBS 322 antigens

| | | GBS 80 | | | GBS 322 | | |
|---|---|---|---|---|---|---|---|
| | | | Protection | | | Protection | |
| | | FACS | (% survival) | | FACS | (% survival) | |
| GBS strains | Type | Δ Mean | antigen | ctrl- | Δ Mean | antigen | ctrl- |
| CJB111 | V | 370 | 72% | 40% | 63 | 57% | 40% |
| COH1 | III | 305 | 76% | 10% | 130 | 3% | 10% |
| 2603 | V | 82 | 22% | 34% | 313 | 83% | 34% |
| 7357b- | Ib | 91 | 36% | 34% | 102 | 43% | 34% |
| 18RS21 | II | 0 | 15% | 24% | 268 | 84% | 24% |
| DK21 | II | 0 | 10% | 21% | 416 | 67% | 25% |
| A909 | Ia | 0 | 0% | 14% | | | |
| 090 | Ia | 0 | 0% | 0% | | | |
| H36B | Ib | | | | 105 | 34% | 32% |

Thus, inclusion of a non-AI protein in an immunogenic composition of the invention may provide increased protection a mammal.

[1558] The immunogenic compositions comprising S. pneumonaie AI polypeptides may further secondary SP protein antigens which include (a) any of the SP protein antigens disclosed in WO 02/077021 or U.S. provisional application ______, filed Apr. 20, 2005 (Attorney Docket Number 002441.00154), (2) immunogenic portions of the antigens comprising at least 7 contiguous amino acids, (3) proteins comprising amino acid sequences which retain immunogenicity and which are at least 95% identical to these SP protein antigens (e.g., 95%, 96%, 97%, 98%, 99%, or 99.5% identical), and (4) fusion proteins, including hybrid SP protein antigens, comprising (1)-(3).

[1559] Alternatively, the invention may include an immunogenic composition comprising a first and a second Gram positive bacteria non-AI protein, wherein the polynucleotide sequence encoding the sequence of the first non-AI protein is less than 90% (i.e., less than 90, 88, 86, 84, 82, 81, 78, 76, 74, 72, 70, 65, 60, 55, 50, 45, 40, 35, or 30 percent) homologous than the corresponding sequence in the genome of the second non-AI protein.

[1560] The compositions of the invention may further comprise one or more additional non-Gram positive bacterial antigens, including additional bacterial, viral or parasitic antigens. The compositions of the invention may further comprise one or more additional non-GBS antigens, including additional bacterial, viral or parasitic antigens.

[1561] In another embodiment, the GBS antigen combinations of the invention are combined with one or more additional, non-GBS antigens suitable for use in a vaccine designed to protect elderly or immunocomprised individuals. For example, the GBS antigen combinations may be combined with an antigen derived from the group consisting of Enterococcus faecalis, Staphylococcus aureus, Staphylococcus epidermis, Pseudomonas aeruginosa, Legionella pneumophila, Listeria monocytogenes, Neisseria meningitides, influenza, and Parainfluenza virus (‘PIV’).

[1562] Where a saccharide or carbohydrate antigen is used, it is preferably conjugated to a carrier protein in order to enhance immunogenicity {e.g. Ramsay et al. (2001) Lancet 357(9251):195-196; Lindberg (1999) Vaccine 17 Suppl 2:S28-36; Buttery & Moxon (2000) J R Coll Physicians Lond 34:163-168; Ahmad & Chapnick (1999) Infect Dis Clin North Am 13:113-133, vii.; Goldblatt (1998) J. Med. Microbiol. 47:563-567; European patent 0 477 508; U.S. Pat. No. 5,306,492; International patent application WO98/42721; Conjugate Vaccines (eds. Cruse et al.) ISBN 3805549326, particularly vol. 10:48-114; and Hermanson (1996) Bioconjugate Techniques ISBN: 0123423368 or 012342335X}. Preferred carrier proteins are bacterial toxins or toxoids, such as diphtheria or tetanus toxoids. The CRM₁₉₇ diphtheria toxoid is particularly preferred {Research Disclosure, 453077 (January 2002)}. Other carrier polypeptides include the N. meningitidis outer membrane protein (EP-A-0372501), synthetic peptides (EP-A-0378881; EP-A-0427347), heat shock proteins (WO 93/17712; WO 94/03208), pertussis proteins (WO 98/58668; EP A 0471177), protein D from H. influenzae (WO 00/56360), cytokines (WO 91/01146), lymphokines, hormones, growth factors, toxin A or B from C. difficile (WO00/61761), iron-uptake proteins (WO01/72337), etc. Where a mixture comprises capsular saccharides from both serogroups A and C, it may be preferred that the ratio (w/w) of MenA saccharide:MenC saccharide is greater than 1 (e.g. 2:1, 3:1, 4:1, 5:1, 10:1 or higher). Different saccharides can be conjugated to the same or different type of carrier protein. Any suitable conjugation reaction can be used, with any suitable linker where necessary.

[1563] Toxic protein antigens may be detoxified where necessary e.g. detoxification of pertussis toxin by chemical and/or genetic means.

[1564] Where a diphtheria antigen is included in the composition it is preferred also to include tetanus antigen and pertussis antigens. Similarly, where a tetanus antigen is included it is preferred also to include diphtheria and pertussis antigens. Similarly, where a pertussis antigen is included it is preferred also to include diphtheria and tetanus antigens.

[1565] Antigens in the composition will typically be present at a concentration of at least 1 μg/ml each. In general, the concentration of any given antigen will be sufficient to elicit an immune response against that antigen.

[1566] As an alternative to using protein antigens in the composition of the invention, nucleic acid encoding the antigen may be used {e.g. refs. Robinson & Torres (1997) Seminars in Immunology 9:271-283; Donnelly et al. (1997) Annu Rev Immunol 15:617-648; Scott-Taylor & Dalgleish (2000) Expert Opin Investig Drugs 9:471480; Apostolopoulos & Plebanski (2000) Curr Opin Mol Ther 2:441-447; Ilan (I 999) Curr Opin Mol Ther 1:116-120; Dubensky et al. (2000) Mol Med 6:723-732; Robinson & Pertmer (2000) Adv Virus Res 55:1-74; Donnelly et al. (2000) Am J Respir Crit Care Med 162(4 Pt 2):S 190-193; and Davis (1999) Mt. Sinai J. Med. 66:84-90}. Protein components of the compositions of the invention may thus be replaced by nucleic acid (preferably DNA e.g. in the form of a plasmid) that encodes the protein.

Definitions

[1567] The term “comprising” means “including” as well as “consisting” e.g. a composition “comprising” X may consist exclusively of X or may include something additional e.g. X+Y.

[1568] The term “about” in relation to a numerical value x means, for example, x±10%.

[1569] References to a percentage sequence identity between two amino acid sequences means that, when aligned, that percentage of amino acids are the same in comparing the two sequences. This alignment and the percent homology or sequence identity can be determined using software programs known in the art, for example those described in section 7.7.18 of Current Protocols in Molecular Biology (F. M. Ausubel et al., eds., 1987) Supplement 30. A preferred alignment is determined by the Smith-Waterman homology search algorithm using an affine gap search with a gap open penalty of 12 and a gap extension penalty of 2, BLOSUM matrix of 62. The Smith-Waterman homology search algorithm is disclosed in Smith & Waterman (1981) Adv. Appl. Math. 2: 482-489.

[1570] The invention is further illustrated, without limitation, by the following examples.

### EXAMPLE 1

### Binding of an Adhesin Island Surface Protein, GBS 80, to Fibrinogen and Fibronectin

[1571] This example demonstrates that an Adhesin Island surface protein, GBS 80 can bind to fibrinogen and fibronectin.

[1572] An enzyme-linked immunosorbent assay (ELISA) was used to analyse the in vitro binding ability of recombinant GBS 80 to immobilized extra-cellular matrix (ECM) proteins but not to bovine serum albumin (BSA). Microtiter plates were coated with ECM proteins (fibrinogen, fibronectin, laminin, collagen type IV) and binding assessed by adding varying concentrations of a recombinant form of GBS 80, over-expressed and purified from E. coli (FIG. 5A). Plates were then incubated sequentially with a) mouse anti-GBS 80 primary antibody; b) rabbit anti-mouse AP-conjugated secondary antibody; c) pNPP colorimetric substrate. Relative binding was measured by monitoring absorbance at 405 nm, using 595 nm as a reference wavelength. FIG. 5b shows binding of recombinant GBS 80 to immobilized ECM proteins (1 μg) as a function of concentration of GBS 80. BSA was used as a negative control. Data points represent the means of OD₄₀₅ values±standard deviation for 3 wells.

[1573] Binding of GBS 80 to the tested ECM proteins was found to be concentration dependent and exhibited saturation kinetics. As is also evident from FIG. 5, binding of GBS 80 to fibronectin and fibrinogen was greater than binding to laminin and collagen type IV at all the concentrations tested.

### EXAMPLE 2

### GBS 80 is Required for Surface Localization of GBS 104

[1574] This example demonstrates that co-expression of GBS 80 is required for surface localization of GBS 104.

[1575] The polycistronic nature of the Adhesin Island I mRNA was investigated through reverse transcriptase-PCR (RT-PCR) analysis employing primers designed to detect transcripts arising from contiguous genes. Total RNA was isolated from GBS cultures grown to an optical density at 600 nm (OD₆₀₀) of 0.3 in THB (Todd-Hewitt broth) by the RNeasy Total RNA isolation method (Qiagen) according to the manufacturer's instructions. The absence of contaminating chromosomal DNA was confirmed by failure of the gene amplification reactions to generate a product detectable by agarose gel electrophoresis, in the absence of reverse transcriptase. RT-PCR analysis was performed with the Access RT-PCR system (Promega) according to the manufacturer's instructions, employing PCR cycling temperatures of 60° C. for annealing and 70° C. for extension. Amplification products were visualized alongside 100-bp DNA markers in 2% agarose gels after ethidium bromide staining.

[1576] FIG. 5 shows that all the genes are co-transcribed as an operon. A schematic of the AI-1 operon is shown above the agarose gel analysis of the RT-PCR products. Large rectangular arrows indicate the predicted transcript direction. Primer pairs were selected such as “1-4” cross the 3′finish-5′start of successive genes and overlap each gene by at least 200 bp. Additionally, “1” crosses a putative rho-independent transcriptional terminator. “5” is an internal GBS 80 control and “6” is an unrelated control from a highly expressed gene. Lanes: “a”: RNA plus RTase enzyme; “b” RNA without RTase; “c”: genomic DNA control.

[1577] In the effort to elucidate the functions of the AI-1 proteins, in frame deletions of all of the genes within the operon have been constructed and the resulting mutants characterized with respect to surface exposure of the encoded antigens (see FIG. 8).

[1578] Each in-frame deletion mutation was constructed by splice overlap extension PCR(SOE-PCR) essentially as decribed by Horton et al. [Horton R. M., Z. L. Cai, S. N. Ho, L. R. Pease (1990) Biotechniques 8:528-35] using suitable primers and cloned into the temperature sensitive shuttle vector pJRS233 to replace the wild type copy by allelic exchange [Perez-Casal, J., J. A. Price, et al. (1993) Mol Microbiol 8(5): 809-19.]. All plasmid constructions utilized standard molecular biology techniques, and the identities of DNA fragments generated by PCR were verified by sequencing. Following SOE-PCR, the resulting mutant DNA fragments were digested with XhoI and EcoRI, and ligated into a similarly digested pJRS233. The resuting vectors were introduced by electroporation into the chromosome of 2603 and COH1 GBS strains in a three-step process, essentially as described in Framson et al. [Framson, P. E., A. Nittayajarn, J. Merry, P. Youngman, and C. E. Rubens. (1997) Appl. Environ. Microbiol. 63(9):353947]. Briefly, the vector pJRS233 contains an erm gene encoding erythromycin resistance and a temperature-sensitive gram-positive replicon that is active at 30° C. but not at 37° C. Initially, the constructs are electroporated into GBS electro-competent cells prepared as described by Frameson et al., and transformants containing free plasmid are selected by their ability to grow at 30° C. on Todd-Hewitt Broth (THB) agar plates containing 1 μg/ml erythromycin. The second step includes a selection step for strains in which the plasmid has integrated into the chromosome via a single recombination event over the homologous plasmid insert and chromosome sequence by their ability to grow at 37° C. on THB agar medium containing 1 mg/ml erythromycin. In the third step, GBS cells containing the plasmid integrated within the chromosome (integrants) are serially passed in broth culture in the absence of antibiotics at 30° C. Plasmid excision from the chromosome via a second recombination event over the duplicated target gene sequence either completed the allelic exchange or reconstituted the wild-type genotype. Subsequent loss of the plasmid in the absence of antibiotic selection pressure resulted in an erythromycin-sensitive phenotype. In order to assess gene replacement a screening of erythromycin-sensitive colonies was performed by analysis of the target gene PCR amplicons.

[1579] FIG. 7 reports a schematic of the IS-1 operon for each knock-out strain generated, along with the deletion position within the amino acidic sequence. Most data presented here concern the COH1 deletion strains, in which the expression of each of the antigens is higher by DNA microarray analysis (data not shown) as well as detectable by FACS analysis (see FIG. 8). The double mutant in 2603 Δ80, Δ104 double mutant was constructed by sequential allelic exchanges of the shown alleles.

[1580] Immunization Protocol

[1581] Immune sera for FACS experiments were obtained as follows.

[1582] Groups of 4 CD-1 outbred female mice 6-7 weeks old (Charles River Laboratories, Calco Italy) were immunized with the selected GBS antigens, (20 μg of each recombinant GBS antigen), suspended in 100 μl of PBS. Each group received 3 doses at days 0, 21 and 35. Immunization was performed through intra-peritoneal injection of the protein with an equal volume of Complete Freund's Adjuvant (CFA) for the first dose and Incomplete Freund's Adjuvant (IFA) for the following two doses. In each immunization scheme negative and positive control groups are used. Immune response was monitored by using serum samples taken on day 0 and 49.

[1583] FACS Analysis

[1584] Preparation of paraformaldehyde treated GBS cells and their FACS analysis were carried out as follows.

[1585] GBS serotype COH1 strain cells were grown in Todd Hewitt Broth (THB; Difco Laboratories, Detroit, Mich.) to OD600 nm=0.5. The culture was centrifuged for 20 minutes at 5000 rpm and bacteria were washed once with PBS, resuspended in PBS containing 0.05% paraformaldehyde, and incubated for 1 hours at 37° C. and then overnight at 4° C. 50 μl of fixed bacteria (OD600 0.1) were washed once with PBS, resuspended in 20 μl of Newborn Calf Serum, (Sigma) and incubated for 20 min. at room temperature. The cells were then incubated for 1 hour at 4° C. in 100 μl of preimmune or immune sera, diluted 1:200 in dilution buffer (PBS, 20% Newborn Calf Serum, 0.1% BSA). After centrifugation and washing with 200 μl of washing buffer (0.1% BSA in PBS), samples were incubated for 1 hour at 4° C. with 50 μl of R-Phicoerytrin conjugated F(ab)2 goat anti-mouse IgG (Jackson ImmunoResearch Laboratories; Inc.), diluted 1:100 in dilution buffer. Cells were washed with 200 μl of washing buffer and resuspended in 200 μl of PBS. Samples were analysed using a FACS Calibur apparatus (Becton Dickinson, Mountain View, Calif.) and data were analyzed using the Cell Quest Software (Becton Dickinson). A shift in mean fluorescence intensity of >75 channels compared to preimmune sera from the same mice was considered positive. This cutoff was determined from the mean plus two standard deviations of shifts obtained with control sera raised against mock purified recombinant proteins from cultures of E. coli carrying the empty expression vector and included in every experiment. Artifacts due to bacterial lysis were excluded using antisera raised against 6 different known cytoplasmic proteins all of which were negative

[1586] FACS data on COH1 single KO mutants for GBS 104 and GBS 80 indicated that GBS 80 is required for surface localization of GBS 104.

[1587] As shown in FIG. 8, GBS 104 is not surface exposed in the Δ80 strain (second column, bottom), but is present in the whole protein extracts (see FIG. 10). Mean shift values suggest that GBS 104 is partially responsible for GBS 80 surface exposure (Mean shift of GBS 80 is reduced to ˜60% wild-type levels in Δ104), and that GBS 80 is over-expressed in the complemented strain (mean shift value ˜200% wild-type level). The Δ80/pGBS 80 strain contains the GBS 80 orf cloned in the shuttle-vector pAM401 (Wirth, R., F. Y. An, et al. (1986). J Bacteriol 165(3): 831-6). The vector alone does not alter the secretion pattern of GBS 104 (right column). FACS was performed on mid-log fixed bacteria with mouse polyclonal antibodies as indicated at left. Black peak is pre-immune sera, colored peaks are sera from immunized animals.

### EXAMPLE 3

### Deletion of GBS 80 Causes Attenuation In Vivo

[1588] This example demonstrates that deletion of GBS 80 causes attenuation in vivo, suggesting that this protein contributes to bacterial virulence.

[1589] By using a mouse animal model, we studied the role of GBS 80 and GBS 104 in the virulence of S. agalactiae.

[1590] Groups of ten outbred female mice 5-6 week weeks old (Charles River Laboratories, Calco Italy) were inoculated intraperitoneally with different dilutions of the mutant strains and LD50 (lethal dose 50) were calculated according to the method of Reed and Muench [Reed, L. J. and H. Muench (1938). The American Journal of Hygiene 27(3): 493-7]. As presented in the table below the number of colony forming units (cfu) counted for both the Δ80 and the Δ80, Δ104 double mutants is about 10 fold higher when compared to the wild type strain suggesting that inactivation of GBS 80 but not GBS 104 is responsible for an attenuation in virulence. This finding indicates that GBS 80 gene in the AI-1 might contribute to virulence.

TABLE
Lethal dose 50% analysis of AI-1 mutants in the 2603 strain background.
LD₅₀ₛ were performed by IP injection of female CD1 mice at an age
of 5-6 weeks. LD₅₀ₛ were calculated by the
method of Reed and Muench (8).

| GBS strain | LD₅₀, cfu | Number of Experiments |
|---|---|---|
| Wild Type 2603 | 2 × 10⁸ | 4 |
| Δ104 mutant | ˜2 × 10⁸ | 1 |
| Δ80 mutant | 2.6 × 10⁹ | 3 |
| Δ80, Δ104 double mutant | ˜2 × 10⁹ | 1 |

### EXAMPLE 4

### Effect of Adhesin Island Sortase Deletions on Surface Antigen Presentation

[1591] This example demonstrates the effect of adhesin island sortase deletions on surface antigen presentation.

[1592] FACS analysis results set forth in FIG. 9 show that a deletion in sortase SAG0648 prevented GBS 104 from reaching the surface and slightly reduced the surface exposure of GBS 80 (fourth panel; mean shift value ˜60% wild-type COH1). In the double sortase knock-out strain, neither antigen was surface exposed (far right panel). Either sortase alone was sufficient for GBS 80 to arrive at the bacterial surface (third and fourth columns, top). No effect was seen on surface exposure of antigens GBS 80 or GBS 104 in the ΔGBS 52 strain. Antibodies derived from purified GBS 52 were either non-specific or were FACS negative for GBS 52 (data not shown). FACS analysis was performed as described above (see EXAMPLE 2).

[1593] As shown in FIG. 10, inactivation of GBS 80 has no effect on GBS 104 expression as much as GBS 104 knock out doesn't change the total amount GBS 80 expressed. The Western blot of whole protein extracts (strains noted above lanes) probed with anti-GBS 80 antisera is shown in panel A. Arrow indicates expected size of GBS 80 (60 kDa). GBS 80 antibodies recognize a doublet, the lower band is not present in ΔGBS 80 strains. Panel B shows a Western blot of whole protein extracts probed with anti-GBS 104 antisera. Arrow indicates expected size of GBS 104 (99.4 kDa). Protein extracts were prepared from the same bacterial cultures used for FACS (FIGS. 8 and 9). In conclusion, although GBS 104 does not arrive at the surface in the Δ80 strain by FACS (FIG. 8, second column), it is present at approximately wild-type levels in the whole protein preps (B, second lane). Approximately 20 μg of each protein extract was loaded per lane.

[1594] Western-Blot Analysis

[1595] Aliquots of total protein extract mixed with SDS loading buffer (1×:60 mM TRIS-HCl pH 6.8, 5% w/v SDS, 10% v/v glycerin, 0.1% Bromophenol Blue, 100 mM DTT) and boiled 5 minutes at 95° C., were loaded on a 12.5% SDS-PAGE precast gel (Biorad). The gel is run using a SDS-PAGE running buffer containing 250 mM TRIS, 2.5 mM Glycine and 0.1% SDS. The gel is electroblotted onto nitrocellulose membrane at 200 mA for 60 minutes. The membrane is blocked for 60 minutes with PBS/0.05% Tween-20 (Sigma), 10% skimmed milk powder and incubated O/N at 4° C. with PBS/0.05% Tween 20, 1% skimmed milk powder, with the appropriate dilution of the sera. After washing twice with PBS/0.05% Tween, the membrane is incubated for 2 hours with peroxidase-conjugated secondary anti-mouse antibody (Amersham) diluted 1:4000. The nitrocellulose is washed three times for 10 minutes with PBS/0.05% Tween and once with PBS and thereafter developed by Opti-4CN Substrate Kit (Biorad).

### EXAMPLE 5

### Binding of Adhesin Island Proteins to Epithelial Cells and Effect of Adhesin Island Proteins on Capacity of GBS to Adhere to Epithelial Cells

[1596] This example illustrates the binding of AI proteins to epithelial cells and the effect of AI proteins on the capacity of GBS to adhere to epithelial cells.

[1597] Applicants analysed whether recombinant AI surface proteins GBS 80 or GBS 104 would demonstrate binding to various epithelial cells in a FACS analysis. Applicants also analysed whether deletion of AI surface proteins GBS 80 or GBS 104 would effect the capacity of GBS to adhere to and invade ME180 cervical epithelial cells.

[1598] As shown in FIG. 28, deletion of GBS 80 sequence from GBS strain isolate 2603 (serotype V) did not affect the capacity of the mutated GBS to adhere to and invade ME180 cervical epithelial cells. Here ME180 cervical carcinoma epithelial cells were infected with wild type GBS 2603 or GBS 2603 Δ80 isogenic mutant. After two hours of infection, non-adherent bacteria were washed off and infection prolonged for a further two hours and four hours. In invasion experiments, after each time point, was followed by a two hour antibiotic treatment. Cells were then lysed with 1% saponin and lysates platedon TSA plates. As shown in FIG. 28, there was little difference between the percent invasion or percent adhesion of wild type and mutant strains up to the four hour time point.

[1599] FIG. 30 repeats this experiment with both Δ104 and Δ80 mutants from a different strain isolate. Here, ME180 cervical carcinoma epithelial cells were infected with GBS strain isolate COH (serotype III) wild type or COH1 ΔGBS 104 or COH1 Δ80 isogenic mutant. After one hour of infection, non-adherent bacteria were washed off and the cells were lysed with 1% saponin. The lysates were plated on TSA plates. As shown in FIG. 30, while there was little difference in the percent invasion, there was a significant decrease in the percent association of the Δ104 mutant compared to both the wild type and Δ80 mutant.

[1600] The affect of AI surface proteins on the ability of GBS to translocate through an epithelial monolayer was also analysed. As shown in FIG. 31, a GBS 80 knockout mutant strain partially loses the ability to translocate through an epithelial monolayer. Here epithelial monolayers were inoculated with wildtype or knockout mutant in the apical chamber of a transwell system for two hours and then non-adherent bacteria were washed off. Infection was prolonged for a further two and four hours. Samples were taken from the media of the basolateral side and the number of colony forming unties measured. Transepithelial electrical resistance measured prior to and after infection gave comparable values, indicating the maintenance of the integrity of the monolayer. By the six hour time point, the Δ80 mutants demonstrated a reduced percent transcytosis.

[1601] A similar experiment was conducted with GBS 104 knock out mutants. Here, as shown in FIG. 22, the Δ104 mutants also demonstrated a reduced percent transcytosis, indicating that the mutant strains translocate through an epithelial monolayer less efficiently than their isogenic wild type counterparts.

[1602] Applicants also studied the effect of AI proteins on the capacity of a GBS strain to invade J774 macrophage-like cells. Here, J774 cells were infected with GBS COH1 wild type or COH1 ΔGBS 104 or COH1 ΔGBS80 isogenic mutants. After one hour of infection, non-adherent bacteria were washed off and intracellular bacteria were recovered at two, four and six hours post antibiotic treatment. At each time point, cells were lysed with 0.25% Triton X-100 and lysates plated on TSA plates. As shown in FIG. 32, the Δ104 mutant demonstrated a significantly reduced percent invasion compared to both the wild type and Δ80 mutant.

### EXAMPLE 6

### Hyperoligomeric Structures Comprising AI Surface Proteins GBS 80 and GBS 104

[1603] This example illustrates hyperoligomeric structures comprising AI surface proteins GBS 80 and GBS 104. A GBS isolate COH1 (serotype III) was adapted to increase expression of GBS 80. FIG. 34 presents a regular negative stain electron micrograph of this mutant; no pilus or hyperoligomeric structures are distinguishable on the surface of the bacteria. When the EM stain is based on anti-GBS 80 antibodies labelled with 10 or 20 nm gold particles, the presence of GBS 80 throughout the hyperoligomeric structure is clearly indicated (FIGS. 36, 37 and 38). EM staining against GBS 104 (anti-GBS 104 antibodies labelled with 10 nm gold particles) also reveals the presence of GBS 104 primarily on or near the surface of the bacteria or potentially associated with bacterial peptidoglycans (FIG. 39). Analysis of this same strain (over-expressing GBS 80) with a combination of both anti-GBS 80 (using 20 nm gold particles) and anti-GBS 104 (using 10 nm gold particles) reveals the presence of GBS 104 on the surface and within the hyperoligomeric structures (see FIGS. 40 and 41).

### EXAMPLE 7

### GBS 80 is Necessary for Polymer Formation and GBS 104 and Sortase SAG0648 are Necessary for Efficient Pili Assembly

[1604] This example demonstrates that GBS 80 is necessary for formation of polymers and that GBS 104 and sortase SAG0648 are necessary for efficient pili assembly. GBS 80 and GBS 104 polymeric assembly was systematically analyzed in Coh1 strain single knock out mutants of each of the relevant coding genes in AI-1 (GBS 80, GBS 104, GBS 52, sag0647, and sag0648). FIG. 41 provides Western blots of total protein extracts (strains noted above lanes) probed with either anti-GBS 80 (left panel) sera or anti-GBS 104 sera (right panel) for each of these Coh1 and Coh1 knock out strains. (Coh1, wild type Coh1; Δ80, Coh1 with GBS 80 knocked out; Δ104, Coh1 with GBS 104 knocked out; Δ52, Coh1 with GBS 52 knocked out; A647, Coh1 with SAG0647 knocked out; A648, Coh1 with SAG0648 knocked out, A647-8, Coh1 with SAG0647 and SAG0648 knocked out; Δ80/pGBS80, Coh1 with GBS 80 knocked out but complemented with a high copy number plasmid expressing GBS 80. Asterisks identify the monomer of GBS 80 and GBS 104.)

[1605] The smear of immunoreactive material observed in the wild type strain, along with its disappearance in Δ80 and Δ104 mutants, is consistent with the notion that such high molecular weight structures are composed of covalently linked (SDS-resistant) GBS 80 and GBS 104 subunits. The immunoblotting with both anti-GBS 80 (α-GBS 80) and anti-GBS 104 (α-GBS 104) revealed that deletion of sortase SAG0648 also interferes with the assembly of high molecular weight species, whereas the knock out mutant of the second sortase (SAG0647), even if somehow reduced, still maintains the ability to form polymeric structures.

[1606] Total extracts form GBS were prepared as follows. Bacteria were grown in 50 ml of Todd-Hewitt broth (Difco) to an OD₆₀₀ₙₘ of 0.5-0.6 and successively pelleted. After two washes in PBS the pellet was resuspended and incubated 3 hours at 37° C. with mutanolisin. Cells were then lysed with at least three freezing-thawing cycles in dry ice and a 37° C. bath. The lysate was then centrifuged to eliminate the cellular debris and the supernatant was quantified. Approximately 40 μg of each protein extract was separated on SDS-PAGE. The gel was then subjected to immunoblotting with mice antisera and detected with chemiluminescence.

### EXAMPLE 8

### GBS 80 is Polymerized by an AI-2 Sortase

[1607] This example illustrates that GBS 80 can be polymerized not only by AI-1 sortases, but also by AI-2 sortases. FIG. 42 shows total cell extract immunoblots of GBS 515 strain, which lacks AI-1. The left panel, where an anti-GBS 67 sera was used, shows that GBS 67 from AI-2 is assembled into high-molecular weight-complexes, suggesting the formation of a second type of pilus. The same high molecular structure is observed when GBS 80 is highly expressed by reintroducing the gene within a plasmid (pGBS 80). By using anti-GBS 80 (right panel) sera on the same extracts, again it is observed that, with GBS 80 over expression (515/pGBS 80), a high-molecular weight structure is assembled. This implies that, in the absence of AI-1 sortases, AI-2 sortases (SAG1405 and SAG1406) can complement the lacking function, still being able to assemble GBS 80 in a pilus structure.

### EXAMPLE 9

### Coh1 Produces a High Molecular Weight Molecule, the GBS 80 Pilin

[1608] This example illustrates that Coh1 produces a high molecular weight molecule, greater than 1000 kDa, which is the GBS 80 pilin. FIG. 43 provides silver-stained electrophoretic gels that show that Coh1 produces two macromolecules. One of these macromolecules disappears in the Coh1 GBS 80 knock out cells, but does not disappear in the Coh1 GBS 52 knock out mutant cells. The last two lanes on the right were loaded with 15 times the amount loaded in the other lanes. This was done in order to be able to count the bands. By doing this, a conservative size estimate of the top bands was calculated by starting at 240 kDa and considering each of 14 higher bands as the result of consecutive additions of a GBS 80 monomer.

[1609] Coh1, wild type Coh1; Δ80, Coh1 cells with GBS 80 knocked out; Δ52, Coh1 cells with GBS 52 knocked out; Δ80/pGBS 80, Coh1 cells with GBS 80 knocked out and complemented with a high copy number construct expressing GBS 80.

### EXAMPLE 10

### GBS 52 is a Minor Component of the GBS Pilus

[1610] This example illustrates that GBS 52 is present in the GBS pilus and is a minor component of the pilus. FIG. 45 shows an immunoblot of total cell extracts from a GBS Coh1 strain and a GBS Coh1 strain knocked out for GBS 52 (Δ52). The total cell extracts were immunoblotted anti-GBS 80 antisera (left) and anti-GBS 52 antisera (right). Immunoblotting was performed using a 3-8% Tris-acetate polyacrylamide gel (Invitrogen) which provided excellent separation of large molecular weight proteins (see FIG. 41). When the gel was incubated with anti-GBS 80 sera, the bands from the Coh1 wild-type strain appeared shifted when compared to the Δ52 mutant. This observation indicated a different size of the pilus polymeric components in the two strains. When the same gel was stripped and incubated with anti-GBS 52 sera the high-molecular subunits in the Coh1 wild-type strain showed similar molecular size of those in the correspondent lane in the left panel. These findings confirmed that GBS 52 is indeed associated with GBS 80 macro-molecular structures but represents a minor component of the GBS pilus.

### EXAMPLE 11

### Pilus Structures are Present in the Supernatant of GBS Bacterial Cultures

[1611] This example illustrates that the pilus structure assembled in Coh1 GBS is present in the supernatant of a bacterial cell culture. FIG. 46 shows an immunoblot where the protein extract of the supernatant from cultures of different GBS mutant strains (117=Coh1 GBS 80 knockout; 159=Coh1 GBS 104 knockout; 202=Coh1 GBS 52 knockout; 206=Coh1 GBS sag0647 knockout; 208=Coh1 GBS sag0648 knockout; 197=Coh1 GBS sag0647/sag0648 knockout; 179=Coh1 GBS 80 knockout complemented with a high copy plasmid expressing GBS 80). GBS 80 antisera detects the presence of pilus structures in the appropriate Coh1 strains.

[1612] The protein extract was prepared as follows. Bacteria were grown in THB to an OD₆₀₀ₙₘ of 0.5-0.6 and the supernatant was separated from the cells by centrifugation. The supernatant was then filtered (527 0.2 μm) and 1 ml was added with 60% TCA for protein precipitation.

[1613] GBS pili were also extracted from the fraction of surface-exposed proteins in Coh1 strain and its GBS 80 knock out mutant as described hereafter. Bacteria were grown to an OD₆₀₀ₙₘ of 0.6 in 50 ml of THB at 37° C. Cells were washed once with PBS and the pellet was then resuspended in 0.1 M KPO4 pH 6.2, 40% sucrose, 10 mM MgCl2, 400 U/ml mutanolysin and incubated 3 hours at 37° C. Protoplasts were separated by centrifugation and the supernatant was recovered and its protein content measured.

[1614] In order to study the dynamics of pilus production during different growth phases, 1 ml supernatant of a culture at different OD₆₀₀ₙₘ was TCA precipitated and loaded onto a 3-8% SDS-PAGE as described before. FIG. 47 shows the corresponding Western blot with GBS 80 anti-sera. The first group of lanes (left five sample lanes) refer to a Coh1 strain growth (OD₆₀₀ₙₘ are noted above the lanes) whereas the second group of lanes (right five samples) are from a GBS 80 knock out strain over expressing GBS 80. The experiment shows that pilus macromolecular structures can be found in the supernatant in all of the growth phases tested.

### EXAMPLE 12

### In GBS Strain Coh1, only GBS 80 and a Sortase (sag0647 or sag0648) is Required for Polymerization

[1615] This example describes requirements for pilus formation in Coh1. FIG. 48 shows a Western blot of total protein extracts (prepared as described before) using anti-GBS 80 sera on Coh1 clones. (Coh1, wild type Coh1; Δ104, Coh1 knocked out for GBS 104, Δ647, Coh1 knocked out for sag0647, Δ648, Coh1 knocked for sag0648, Δ647-8, Coh1 knocked out for sag0647 and sag0648; 515, wild type bacterial strain 515, which lacks an AI-1; p80 a high copy number plasmid which expresses GBS 80.) The data show that only the double sortase mutant is unable to polymerize GBS 80 indicating that the ‘conditio sine qua non’ for pilus polymerization is the co-existence of GBS 80 with at least one sortase. This result leads to a reasonable assumption that SAG1405 and SAG1406 are responsible for polymerization in this strain.

### EXAMPLE 13

### GBS 80 can be Expressed in L. lactis Under its Own Promoter and Terminator Sequences

[1616] This example demonstrates that L. lactis, a non-pathogenic bacterium, can express GBS AI polypeptides such as GBS 80. L. lactis M1363 (J. Bacteriol. 154 (1983):1-9) was transformed with a construct encoding GBS 80. Briefly, the construct was prepared by cloning a DNA fragment containing the gene coding for GBS 80 under its own promoter and terminator sequences into plasmid pAM401 (a shuttle vector for E. coli and other Gram positive bacteria; J. Bacteriol. 163 (1986):831-836). Total extracts of the transformed bacteria in log phase were separated on SDS-PAGE, transferred to membranes, and incubated with antiserum against GBS 80. A polypeptide corresponding to the molecular weight of GBS 80 was detected in the lanes containing total extracts of L. lactis transformed with the GBS 80 construct. See FIGS. 133A and 133B, lanes 6 and 7. This same polypeptide was not detected in the lane containing total extracts of L. lactis not transformed with the GBS 80 construct, lane 9. This example shows that L. lactis can express GBS 80 under its own promoter and terminator.

### EXAMPLE 14

### L. lactis Modified to Express GBS AI-1 Under the GBS 80 Promoter and Terminator Sequences Expresses GBS 80 in Polymeric Structures

[1617] This example demonstrates the ability of L. lactis to express GBS AI-1 polypeptides and to incorporate at least some of the polypeptides into oligomers. L. lactis was transformed with a construct containing the genes encoding GBS AI-1 polypeptides. Briefly, the construct was prepared by cloning a DNA fragment containing the genes for GBS 80, GBS 52, SAG0647, SAG0648, and GBS 104 under the GBS 80 promoter and terminator sequences into construct pAM401. The construct was transformed into L. lactis M1363. Total extracts of log phase transformed bacteria were separated on reducing SDS-PAGE, transferred to membranes, and incubated with antiserum against GBS 80. A polypeptide with a molecular weight corresponding to the molecular weight of GBS 80 was detected in the lanes containing L. lactis transformed with the GBS AI-1 encoding construct. See FIG. 134, lane 2. In addition, the same lane also showed immunoreactivity of polypeptides having higher molecular weights than the polypeptide having the molecular weight of GBS 80. These higher molecular weight polypeptides are likely oligomers of GBS 80. Oligomers of similar molecular weights were also observed on a Western blot of the culture supernatant of the transformed L. lactis. See lane 4 of FIG. 135. Thus, this example shows that L. lactis transformed to express GBS AI-1 can efficiently polymerize GBS 80 in the form of a pilus. This pilus structure can likely be purified from either the cell culture supernatant or cell extracts.

### EXAMPLE 15

### Cloning and Expression of S. pneumoniae Sp0462

[1618] This example describes the production of a clone encoding a Sp0462 polypeptide and expression of the clone. To produce a clone encoding Sp0462, the open reading frame encoding Sp0462 was amplified using primers that annealed within the full-length Sp0462 open reading frame sequence. FIG. 150A provides a 893 amino acid sequence of Sp0462. The primers used to produce a clone encoding the Sp0462 polypeptide are shown in FIG. 150B. These primers annealed to the nucleotide sequences encoding the amino acid residues indicated by underlining in FIG. 150A. Amplification of the open reading frame encoding Sp0462 using these primers produced the amplicon shown at lane 2 of the agarose gel provided in FIG. 160. The Sp0462 clone encodes amino acid residues 38-862 of the 893 amino acid residue Sp0462 protein; the italicized residues in FIG. 150A were eliminated. FIG. 151A provides a schematic depiction of the recombinant Sp0462 polypeptide. FIG. 151B shows a schematic depiction of the full-length Sp0462 polypeptide. Both the recombinant Sp0462 encoded by the clone and the full-length Sp0462 protein have two collagen binding protein type B (Cna B) domains and a von Hillebrand factor A (vWA) domain. The cloned recombinant Sp0462 lacks the LPXTG motif present in the full-length Sp0462 protein. Western blot analysis for expression of the Sp0462 clone did not result in detection of polypeptides with serum obtained from S. pneumoniae-infected patients (FIG. 152A) or GBS 80 antiserum (FIG. 152B).

### EXAMPLE 16

### Cloning and Expression of S. pneumoniae Sp0463

[1619] This example describes the production of a clone encoding a Sp0463 polypeptide and detection of recombinant Sp0463 polypeptide expressed from the clone. To produce a clone encoding Sp0463, the open reading frame encoding Sp0463 was amplified using primers that annealed within the full-length Sp0463 open reading frame sequence. FIG. 153A provides a 665 amino acid sequence of Sp0463. The primers used to produce the clone encoding Sp0463 polypeptide are shown in FIG. 153B. These primers annealed to the nucleotide sequences encoding the amino acid residues indicated by underlining in FIG. 153A. Amplification of the open reading frame encoding Sp0463 using these primers produced the amplicon shown at lane 3 of the agarose gel provided in FIG. 160. The Sp0463 clone encodes amino acid residues 23-627 of the 665 amino acid residue Sp0463 protein; the italicized residues in FIG. 153A were eliminated. FIG. 154A provides a schematic depiction of the recombinant Sp0463 polypeptide. FIG. 154B shows a schematic depiction of the full-length Sp0463 polypeptide. Both the recombinant Sp0463 encoded by the clone and the full-length Sp0463 protein have a Cna B domain and an E box motif. The cloned recombinant Sp0463 lacks the LPXTG motif present in the full-length Sp0463 protein. Expression of the Sp0463 clone resulted in the detection of a 60 kD polypeptide, the expected molecular weight of the recombinant Sp0463 polypeptide, by Western blot analysis. See FIG. 155.

### EXAMPLE 17

### Cloning and Expression of S. pneumoniae Sp0464

[1620] This example describes the production of a clone encoding a Sp0464 polypeptide and detection of recombinant Sp0464 polypeptide expressed from the clone. To produce a clone encoding Sp0464, the open reading frame encoding Sp0464 was amplified using primers that annealed either within the full-length Sp0464 open reading frame sequence. FIG. 157A provides a 393 amino acid sequence of Sp0464. The primers used to produce a clone encoding the Sp0464 polypeptide are shown in FIG. 157B. These primers annealed to the nucleotide sequences encoding the amino acid residues indicated by underlining in FIG. 157A. Amplification of the open reading frame encoding Sp0464 using these primers produced the amplicon shown at lane 4 of the agarose gel provided in FIG. 160. The Sp0464 clone encodes amino acid residues 19-356 of the 393 amino acid residue Sp0464 protein; the italicized residues in FIG. 157A were eliminated. FIG. 158A provides a schematic depiction of the recombinant Sp0464 polypeptide. FIG. 158B shows a schematic depiction of the full-length Sp0464 polypeptide. Both the recombinant Sp0464 encoded by the clone and the full-length Sp0464 protein have two Cna B domains. The cloned recombinant Sp0464 lacks the LPXTG motif present in the full-length Sp0464 protein. Expression of the Sp0464 clone resulted in the detection of a 38 kD polypeptide, the expected molecular weight of the recombinant Sp0464 polypeptide, by Western blot analysis. See FIG. 159.

### EXAMPLE 18

### Intranasal Immunization of Mice with Recombinant L. lactis Expressing GBS 80 and Subsequent Challenge

[1621] This example describes a method of intranasally immunizing mice using L. lactis that express GBS 80. Intranasal immunization consisted of 3 doses at days 0, 14 and 28, each dose administered in three consecutive days. Each day, groups of 3 CD-1 outbred female mice 6-7 weeks old (Charles River Laboratories, Calco Italy) were immunized intranasally with 10⁹ or 10¹⁰ CFU of the recombinant Lactococcus lactis suspended in 20 μl of PBS. In each immunization scheme negative (wild-type L. lactis) and positive (recombinant GBS80) control groups were used. The immune response of the dams was monitored by using serum samples taken on day 0 and 49. The female mice were bred 2-7 days after the last immunization (at approximately t=36-37), and typically had a gestation period of 21 days. Within 48 hours of birth, the pups were challenged via I.P. with GBS in a dose approximately equal to an amount which would be sufficient to kill 90% of immunized pups (as determined by empirical data gathered from PBS control groups). The GBS challenge dose is preferably administered in 50 ml of THB medium. Preferably, the pup challenge takes place at 56 to 61 days after the first immunization. The challenge inocula were prepared starting from frozen cultures diluted to the appropriate concentration with THB prior to use. Survival of pups was monitored for 5 days after challenge.

### EXAMPLE 19

### Subcutaneous Immunization of Mice with Recombinant L. lactis Expressing GBS 80 and Subsequent Challenge

[1622] This example describes a method of subcutaneous immunization mice using L. lactis that express GBS 80. Subcutaneous immunization consists of 3 doses at days 0, 14 and 28. Groups of 3 CD-1 outbred female mice 6-7 weeks old (Charles River Laboratories, Calco Italy) were injected subcutaneously with 10⁹ or 10¹⁰ CFU of the recombinant Lactococcus lactis suspended in 100 μl of PBS. In each immunization scheme, negative (wild-type L. lactis) and positive (recombinant GBS80) control groups were used. The immune response of the dams was monitored by using serum samples taken on day 0 and 49. The female mice were bred 2-7 days after the last immunization (at approximately t=36-37), and typically had a gestation period of 21 days. Within 48 hours of birth, the pups were challenged via I.P. with GBS in a dose approximately equal to an amount which would be sufficient to kill 90% of immunized pups (as determined by empirical data gathered from PBS control groups). The GBS challenge dose is preferably administered in 50 ml of THB medium. Preferably, the pup challenge takes place at 56 to 61 days after the first immunization. The challenge inocula were prepared starting from frozen cultures diluted to the appropriate concentration with THB prior to use. Survival of pups was monitored for 5 days after challenge.

### EXAMPLE 20

### Immunization of Mice with GAS AI Polypeptides and Subsequent Intranasal Challenge

[1623] This example describes a method of immunizing mice with GAS AI polypeptides and subsequently intranasally challenging the mice with GAS bacteria. Groups of 10 CD1 female mice aged between 6 and 7 weeks are immunized with a combination of GAS antigens of the invention GAS 15, GAS 16, and GAS 18, (15 μg of each recombinant antigen, derived from M1 strain SF370) or L. lactis expressing the M1 strain SF370 adhesin island, suspended in 100 μl of suitable solution. Each group receives 3 doses at days 0, 21 and 45. Immunization is performed through subcutaneous or intraperitoneal injection for the GAS 15, GAS 16, GAS 18 protein combination. The protein combination is administered with an equal volume of Complete Freund's Adjuvant (CFA) for the first dose and Incomplete Freund's Adjuvant (IFA) for the following two doses. Immunization is performed intranasally for the L. lactis expressing the M1 strain SF370 adhesin island. In each immunization scheme negative and positive control groups are used.

[1624] The negative control group for the mice immunized with the GAS 15, GAS 16, GAS 18 protein combination included mice immunized with PBS. The negative control group for the mice immunized with L. lactis expressing the M1 strain SF370 adhesin island, included mice immunized with either wildtype L. lactis or L. lactis transformed with the pAM401 expression vector lacking any cloned adhesin island sequence.

[1625] The positive control groups included mice immunized with purified M1 strain SF370 M protein.

[1626] Immunized mice are then anaesthetized with Zoletil and challenged intranasally with a 25 μL suspension containing 1.2×10⁶ or 1.2×10⁸ CFU of ISS 3348 in THB. Animals are observed daily and checked for survival.

### EXAMPLE 21

### Active Maternal Immunization Assay

[1627] As used herein, an Active Maternal Immunization assay refers to an in vivo protection assay where female mice are immunized with the test antigen composition. The female mice are then bred and their pups are challenged with a lethal dose of GBS. Serum titers of the female mice during the immunization schedule are measured as well as the survival time of the pups after challenge.

Mouse Immunization

[1628] Specifically, groups of 4 CD-1 outbred female mice 6-8 weeks old (Charles River Laboratories, Calco Italy) are immunized with one or more GBS antigens, (20 μg of each recombinant GBS antigen), suspended in 100 μl of PBS. Each group receives 3 doses at days 0, 21 and 35. Immunization is performed through intra-peritoneal injection of the protein with an equal volume of Complete Freund's Adjuvant (CFA) for the first dose and Incomplete Freund's Adjuvant (IFA) for the following two doses. In each immunization scheme negative and positive control groups are used.

Immune response is monitored by using serum samples taken on day 0 and 49. The sera are analyzed as pools from each group of mice.

Active Maternal Immunization

[1629] A maternal immunization/neonatal pup challenge model of GBS infection was used to verify the protective efficacy of the antigens in mice. The mouse protection study was adapted from Rodewald et al. (Rodewald et al. J. Infect. Diseases 166, 635 (1992)). In brief, CD-1 female mice (6-8 weeks old) were immunized before breeding, as described above. The mice received 20 μg of protein per dose when immunized with a single antigen and 60 μg of protein per dose (15 μg of each antigen) when immunized with the combination of antigens. Mice were bred 2-7 days after the last immunization. Within 48 h of birth, pups were injected intraperitoneally with 50 μl of GBS culture. Challenge inocula were prepared starting from frozen cultures diluted to the appropriate concentration with THB before use. In preliminary experiments (not shown), the challenge doses per pup for each strain tested were determined to cause 90% lethality. Survival of pups was monitored for 2 days after challenge. Protection was calculated as (percentage deadControl minus percentage deadVaccine) divided by percentage deadControl multiplied by 100. Data were evaluated for statistical significance by Fisher's exact test.

### EMBODIMENTS OF THE INVENTION

[1630] The invention encompasses, but is not limited to, the embodiments enumerated below.

[1631] 1. An immunogenic composition comprising a purified Group B Streptococcus (GBS) adhesin island (AI) polypeptide in oligomeric form.

[1632] 2. The immunogenic composition of embodiment 1 wherein the GBS AI polypeptide is selected from a GBS AI-1.

[1633] 3. The immunogenic composition of embodiment 1 wherein the GBS AI polypeptide is selected from a GBS AI-2.

[1634] 1. An immunogenic composition comprising a purified Group B Streptococcus (GBS) adhesin island (AI) polypeptide in oligomeric form.

[1635] 2. The immunogenic composition of embodiment 1 wherein the GBS AI polypeptide is selected from a GBS AI-1.

[1636] 3. The immunogenic composition of embodiment 1 wherein the GBS AI polypeptide is selected from a GBS AI-2.

[1637] 4. The immunogenic composition of any of embodiments 1-3 wherein the GBS AI polypeptide comprises a sortase substrate motif.

[1638] 5. The immunogenic composition of embodiment 4 wherein the sortase substrate motif is an LPXTG motif.

[1639] 6. The immunogenic composition of embodiment 5 wherein the LPXTG motif is represented by the amino acid sequence XPXTG, wherein the X at amino acid position 1 is an L, an I, or an F and the X at amino acid position 3 is any amino acid residue.

[1640] 7. The immunogenic composition of any one of embodiments 1-3 wherein the GBS AI polypeptide affects the ability of GBS bacteria to adhere to epithelial cells.

[1641] 8. The immunogenic composition of any one of embodiments 1-3 wherein the GBS AI polypeptide affects the ability of GBS bacteria to invade epithelial cells.

[1642] 9. The immunogenic composition of any one of embodiments 1-3 wherein the GBS AI polypeptide affects the ability of GBS bacteria to translocate through an epithelial cell layer.

[1643] 10. The immunogenic composition of any one of embodiments 1-3 wherein the GBS AI polypeptide is capable of associating with an epithelial cell surface.

[1644] 11. The immunogenic composition of embodiment 10 wherein the associating with an epithelial cell surface is binding to the epithelial cell surface.

[1645] 12. The immunogenic composition of any of embodiments 1-3 wherein the GBS AI polypeptide is a full-length GBS AI protein.

[1646] 13. The immunogenic composition of any of embodiments 1-3 wherein the GBS AI polypeptide is a fragment of a full-length GBS AI protein.

[1647] 14. The immunogenic composition of embodiment 13 wherein the fragment comprises at least 7 contiguous amino acid residues of the GBS AI protein.

[1648] 15. The immunogenic composition of embodiment 2 wherein the GBS AI polypeptide is selected from the group consisting of GBS 80, GBS 104, GBS 52, and fragments thereof.

[1649] 16. The immunogenic composition of embodiment 3 wherein the GBS AI polypeptide is selected from the group consisting of GBS 59, GBS 67, GBS 150, 01521, 01523, 01524, and fragments thereof.

[1650] 17. The immunogenic composition of embodiment 15 wherein the GBS AI polypeptide is GBS 80.

[1651] 18. The immunogenic composition of any of embodiments 1-3 or 15-17 wherein the oligomeric form is a hyperoligomer.

[1652] 19. The immunogenic composition of any of embodiments 1-3, or 15-17 further comprising a Gram positive bacterium antigen not associated with an AI.

[1653] 20. The immunogenic composition of embodiment 19 wherein the antigen is selected from the group consisting of GBS 322 and GBS 276.

[1654] 21. The immunogenic composition of embodiment 20 wherein the antigen is GBS 322.

[1655] 22. An immunogenic composition comprising a purified Gram positive bacteria adhesin island (AI) polypeptide in an oligomeric form.

[1656] 23. The immunogenic composition of embodiment 22 wherein the Gram positive bacteria is of a genus selected from the group consisting of Streptococcus, Enterococcus, Staphylococcus, or Listeria.

[1657] 24. The immunogenic composition of embodiment 23 wherein the Gram positive bacteria is of the genus Streptococcus.

[1658] 25. The immunogenic composition of any of embodiments 22-24 wherein the Gram positive bacteria AI polypeptide comprises a sortase substrate motif.

[1659] 26. The immunogenic composition of embodiment 25 wherein the sortase substrate motif is an LPXTG motif.

[1660] 27. The immunogenic composition of any one of embodiments 22-24 wherein the Gram positive bacteria AI polypeptide affects the ability of Gram positive bacteria to adhere to epithelial cells.

[1661] 28. The immunogenic composition of any one of embodiments 22-24 wherein the Gram positive bacteria AI polypeptide affects the ability of Gram positive bacteria to invade epithelial cells.

[1662] 29. The immunogenic composition of any one of embodiments 22-24 wherein the Gram positive bacteria AI polypeptide affects the ability of Gram positive bacteria to translocate through an epithelial cell layer.

[1663] 30. The immunogenic composition of any one of embodiments 22-24 wherein the Gram positive bacteria AI polypeptide is capable of associating with an epithelial cell surface.

[1664] 31. The immunogenic composition of embodiment 30 wherein the associating with an epithelial cell surface is binding to the epithelial cell surface.

[1665] 32. The immunogenic composition of any of embodiments 22-24 wherein the Gram positive bacteria AI polypeptide is a full-length Gram positive bacteria AI protein.

[1666] 33. The immunogenic composition of any of embodiments 22-24 wherein the Gram positive bacteria AI polypeptide is a fragment of a full-length Gram positive bacteria AI protein.

[1667] 34. The immunogenic composition of embodiment 33 wherein the fragment comprises at least 7 contiguous amino acid residues of the Gram positive bacteria AI protein.

[1668] 35. The immunogenic composition of embodiment 24 wherein the genus Streptococcus bacteria is Group A Streptococcus (GAS) bacteria and the Gram positive bacteria AI polypeptide is a GAS AI polypeptide.

[1669] 36. The immunogenic composition of embodiment 35 wherein the GAS AI polypeptide is selected from a GAS AI-1.

[1670] 37. The immunogenic composition of embodiment 35 wherein the GAS AI polypeptide is selected from a GAS AI-2.

[1671] 38. The immunogenic composition of embodiment 35 wherein the GAS AI polypeptide is selected from a GAS AI-3.

[1672] 39. The immunogenic composition of embodiment 35 wherein the GAS AI polypeptide is selected from a GAS AI-4.

[1673] 40. The immunogenic composition of any of embodiments 35-39 wherein the GAS AI polypeptide comprises a sortase substrate motif.

[1674] 41. The immunogenic composition of embodiment 40 wherein the sortase substrate motif is an LPXTG motif.

[1675] 42. The immunogenic composition of embodiment 41 wherein the LPXTG motif is represented by XXXXG, wherein the X at the first amino acid position is an L, a V, an E, or a Q, wherein the X at the second amino acid position is P if the X at the first amino acid position is an L, the X at the second amino acid position is a V if the X at the first amino acid position is an E or a Q, or the X at the second amino acid position is a V or a P if the X at the first amino acid position is a V, wherein the X at the third amino acid position is any amino acid residue, and wherein the X at the fourth amino acid position is a T if the X at the first amino acid position is a V, an E, or a Q, or the X at the fourth amino acid position is a T, an S, or an A if the X at the first amino acid position is an L.

[1676] 43. The immunogenic composition of any one of embodiments 35-39 wherein the GAS AI polypeptide affects the ability of GAS bacteria to adhere to epithelial cells.

[1677] 44. The immunogenic composition of any one of embodiments 35-39 wherein the GAS AI polypeptide affects the ability of GAS bacteria to invade epithelial cells.

[1678] 45. The immunogenic composition of any one of embodiments 35-39 wherein the GAS AI polypeptide affects the ability of GAS bacteria to translocate through an epithelial cell layer.

[1679] 46. The immunogenic composition of any one of embodiments 35-39 wherein the GAS AI polypeptide is capable of associating with an epithelial cell surface.

[1680] 47. The immunogenic composition of embodiment 46 wherein the associating with an epithelial cell surface is binding to the epithelial cell surface.

[1681] 48. The immunogenic composition of any of embodiments 35-39 wherein the GAS AI polypeptide is a full-length GAS AI protein.

[1682] 49. The immunogenic composition of any of embodiments 35-39 wherein the GAS AI polypeptide is a fragment of a full-length GAS AI protein.

[1683] 50. The immunogenic composition of embodiment 49 wherein the fragment comprises at least 7 contiguous amino acid residues of the GAS AI protein.

[1684] 51. The immunogenic composition of embodiment 36 wherein the GAS AI-1 polypeptide is selected from the group consisting of M6_Spy0157, M6_Spy0159, M6_Spy0160, CDC SS 410_fimbrial, ISS3650_fimbrial, DSM2071_fimbrial, and fragments thereof.

[1685] 52. The immunogenic composition of embodiment 37 wherein the GAS AI-2 polypeptide is selected from the group consisting of GAS 15, GAS 16, GAS 18, and fragments thereof.

[1686] 53. The immunogenic composition of embodiment 38 wherein the GAS AI-3 polypeptide is selected from the group consisting of SpyM3_{—}0098, SpyM3_{—}0100, SpyM3_{—}0102, SpyM3_{—}0104, SPs0100, SPs0102, SPs0104, SPs0106, orf78, orf80, orf82, orf84, spyM18_{—}0126, spyM18_{—}0128, spyM18_{—}0130, spyM18_{—}0132, SpyoM01000156, SpyoM01000155, SpyoM01000154, SpyoM01000153, SpyoM01000152, SpyoM01000151, SpyoM01000150, SpyoM01000149, ISS3040_fimbrial, ISS3776_fimbrial, ISS4959_fimbrial, and fragments thereof.

[1687] 53. The immunogenic composition of embodiment 39 wherein the GAS AI-4 polypeptide is selected from the group consisting of 19224134, 19224135, 19224137, 19224139, 19224141, 20010296_fimbrial, 20020069_fimbrial, CDC SS 635_fimbrial, ISS4883_fimbrial, ISS4538_fimbrial, and fragments thereof.

[1688] 54. The immunogenic composition of embodiment 24 wherein the Streptococcus bacteria is Streptococcus pneumoniae and the Gram positive bacteria AI polypeptide is a S. pneumoniae AI polypeptide.

[1689] 55. The immunogenic composition of embodiment 54 wherein the S. pneumoniae AI polypeptide comprises a sortase substrate motif.

[1690] 56. The immunogenic composition of embodiment 55 wherein the sortase substrate motif is an LPXTG motif.

[1691] 57. The immunogenic composition of embodiment 54 wherein the S. pneumoniae AI polypeptide affects the ability of S. pneumoniae to adhere to epithelial cells.

[1692] 58. The immunogenic composition of embodiment 54 wherein the S. pneumoniae AI polypeptide affects the ability of S. pneumoniae to invade epithelial cells.

[1693] 59. The immunogenic composition of embodiment 54 wherein the S. pneumoniae AI polypeptide affects the ability of S. pneumoniae to translocate through an epithelial cell layer.

[1694] 60. The immunogenic composition of embodiment 54 wherein the S. pneumoniae AI polypeptide is capable of associating with an epithelial cell surface.

[1695] 61. The immunogenic composition of embodiment 60 wherein the associating with an epithelial cell surface is binding to the epithelial cell surface.

[1696] 62. The immunogenic composition of embodiment 54 wherein the S. pneumoniae AI polypeptide is a full-length S. pneumoniae AI protein.

[1697] 63. The immunogenic composition of embodiment 54 wherein the S. pneumoniae AI polypeptide is a fragment of a full-length S. pneumoniae AI protein.

[1698] 64. The immunogenic composition of embodiment 63 wherein the fragment comprises at least 7 contiguous amino acid residues of the S. pneumoniae AI protein.

[1699] 65. The immunogenic composition of embodiment 54 wherein the S. pneumoniae AI polypeptide is selected from the group consisting of SP0462, SP0463, SP0464, orf3_{—}670, orf4_{—}670, orf5_{—}670, ORF3_{—}14CSR, ORF4_{—}14CSR, ORF5_{—}14CSR, ORF3_{—}19AH, ORF4_{—}19AH, ORF5_{—}19AH, ORF3_{—}19FTW, ORF4_{—}19FTW, ORF5_{—}19FTW, ORF3_{—}23FP, ORF4_{—}23FP, ORF5_{—}23FP, ORF3_{—}23FTW, ORF4_{—}23FTW, ORF5_{—}23FTW, ORF3_{—}6BF, ORF4_{—}6BF, ORF5_{—}6BF, ORF3_{—}6BSP, ORF4_{—}6BSP, ORF5_{—}6BSP, ORF3_{—}9VSP, ORF4_{—}9VSP, ORF5_{—}9VSP, and fragments thereof.

[1700] 66. The immunogenic composition of any one of embodiments 22-24, 35-39, 51-54, or 65 wherein the oligomeric form is a hyperoligomer.

[1701] 67. The immunogenic composition of any one of embodiments 22-24, 35-39, 51-54, or 65 further comprising a Gram positive bacteria antigen not associated with an AI.

[1702] 68. The immunogenic composition of embodiment 67 wherein the antigen is selected from the group consisting of GBS 322 and GBS 276.

[1703] 69. An immunogenic composition comprising a first and a second Group B Streptococcus (GBS) adhesin island (AI) polypeptide.

[1704] 70. The immunogenic composition of embodiment 69 wherein a full-length polynucleotide sequence encoding for the first GBS AI polypeptide is not present in a GBS bacteria genome comprising a polynucleotide sequence encoding for the second GBS AI polypeptide.

[1705] 71. The immunogenic composition of embodiment 69 wherein polynucleotides encoding the first and the second GBS AI polypeptide are each present in genomes of more than one GBS serotype and strain isolate.

[1706] 72. The immunogenic composition of embodiment 69 wherein the first GBS AI polypeptide is encoded by a GBS AI-1.

[1707] 73. The immunogenic composition of embodiment 69 wherein the first GBS AI polypeptide is encoded by a GBS AI-2.

[1708] 74. The immunogenic composition of embodiment 72 wherein the second GBS AI polypeptide is encoded by a GBS AI-2.

[1709] 75. The immunogenic composition of embodiment 73 wherein the second GBS AI polypeptide is encoded by a GBS AI-2.

[1710] 76. The immunogenic composition of embodiment 72 wherein the second GBS AI polypeptide is encoded by a GBS AI-1.

[1711] 77. The immunogenic composition of embodiment 73 wherein the second GBS AI polypeptide is encoded by a GBS AI-1.

[1712] 78. The immunogenic composition of embodiment 72 wherein the first GBS AI polypeptide is selected from the group consisting of GBS 80, GBS 104, GBS 52, and fragments thereof.

[1713] 79. The immunogenic composition of embodiment 73 wherein the first GBS AI polypeptide is selected from the group consisting of GBS 59, GBS 67, GBS 150, 01521, 01523, 01524, and fragments thereof.

[1714] 80. The immunogenic composition of embodiment 74 or 75 wherein the second GBS AI polypeptide is selected from the group consisting of GBS 59, GBS 67, GBS 150, 01521, 01523, 01524, and fragments thereof, and wherein the first and the second GBS AI polypeptide are not the same polypeptide.

[1715] 81. The immunogenic composition of embodiment 76 or 77 wherein the second GBS AI polypeptide is selected from the group consisting of GBS 80, GBS 104, GBS 52, and fragments thereof, and wherein the first and the second GBS AI polypeptide are not the same polypeptide.

[1716] 82. The immunogenic composition of any one of embodiments 69-77 wherein the first GBS AI polypeptide comprises a sortase substrate motif.

[1717] 83. The immunogenic composition of embodiment 82 wherein the sortase substrate motif is an LPXTG motif.

[1718] 84. The immunogenic composition of embodiment 83 wherein the LPXTG motif is represented by the sequence XPXTG, wherein the X at amino acid position 1 is an L, an I, or an F and the X at amino acid position 3 is any amino acid residue.

[1719] 85. The immunogenic composition of any one of embodiments 69-77 wherein the first GBS AI polypeptide affects the ability of GBS bacteria to adhere to epithelial cells.

[1720] 86. The immunogenic composition of any one of embodiments 69-77 wherein the first GBS AI polypeptide affects the ability of GBS bacteria to invade epithelial cells.

[1721] 87. The immunogenic composition of any one of embodiments 69-77 wherein the first GBS AI polypeptide affects the ability of GBS bacteria to translocate through an epithelial cell layer.

[1722] 88. The immunogenic composition of any one of embodiments 69-77 wherein the first GBS AI polypeptide is capable of associating with an epithelial cell surface.

[1723] 89. The immunogenic composition of embodiment 88 wherein the associating with an epithelial cell surface is binding to the epithelial cell surface.

[1724] 90. The immunogenic composition of any of embodiments 69-77 wherein the first GBS AI polypeptide is a full-length GBS AI protein.

[1725] 91. The immunogenic composition of any of embodiments 69-77 wherein the first GBS AI polypeptide is a fragment of a full-length GBS AI protein.

[1726] 92. The immunogenic composition of embodiment 91 wherein the fragment comprises at least 7 contiguous amino acid residues of the first GBS AI protein.

[1727] 93. The immunogenic composition of any one of embodiments 69-79 wherein the first GBS AI polypeptide is in oligomeric form.

[1728] 94. The immunogenic composition of any one of embodiments 69-77 wherein the second GBS AI polypeptide is in oligomeric form.

[1729] 95. The immunogenic composition of any one of embodiments 69-79 wherein the first and the second GBS AI polypeptide are associated in a single oligomeric form.

[1730] 96. The immunogenic composition of embodiment 95 wherein the first and the second GBS AI polypeptides are chemically associated.

[1731] 97. The immunogenic composition of embodiment 95 wherein the first and the second GBS AI polypeptides are physically associated.

[1732] 98. The immunogenic composition of embodiment 93 wherein the oligomeric form is a hyperoligomer.

[1733] 99. The immunogenic composition of embodiment 94 wherein the oligomeric form is a hyperoligomer.

[1734] 100. The immunogenic composition of embodiment 76 wherein the first GBS AI polypeptide is GBS 80 and the second GBS AI polypeptide is GBS 104.

[1735] 101. The immunogenic composition of embodiment 74 wherein the first GBS AI polypeptide is GBS 80 and the second GBS AI polypeptide is GBS 67.

[1736] 102. The immunogenic composition of any one of embodiments 69-79, 100, or 101 further comprising a GBS polypeptide not associated with an AI.

[1737] 103. The immunogenic composition of embodiment 102 wherein the GBS polypeptide not associated with an AI is selected from the group consisting of GBS 322 and GBS 276.

[1738] 104. The immunogenic composition of embodiment 103 wherein the GBS polypeptide not associated with an AI is GBS 322.

[1739] 105. An immunogenic composition comprising a first and a second Gram positive bacteria adhesin island (AI) polypeptide.

[1740] 106. The immunogenic composition of embodiment 105 wherein a full length polynucleotide sequence encoding for the first Gram positive bacteria AI polypeptide is not present in a genome of a Gram positive bacteria comprising a full length polynucleotide sequence encoding for the second Gram positive bacteria AI polypeptide.

[1741] 107. The immunogenic composition of embodiment 105 wherein polynucleotides encoding the first and the second Gram positive bacteria AI polypeptide are each present in genomes of more than one Gram positive bacteria serotype and strain isolate.

[1742] 108. The immunogenic composition of embodiment 105 wherein the first and the second Gram positive bacteria AI polypeptides are of different Gram positive bacteria species.

[1743] 109. The immunogenic composition of embodiment 105 wherein the first and the second Gram positive bacteria AI polypeptides are of the same Gram positive bacteria species.

[1744] 110. The immunogenic composition of embodiment 105 wherein the first and the second Gram positive bacteria AI polypeptides are from different AI subtypes.

[1745] 111. The immunogenic composition of embodiment 105 wherein the first and the second Gram positive bacteria AI polypeptides are from the same AI subtype.

[1746] 112. The immunogenic composition of embodiment 105 wherein the first Gram positive bacteria AI polypeptide has detectable surface exposure on a first Gram positive bacteria strain or serotype but not a second Gram positive bacteria strain or subtype and the second Gram positive bacteria AI polypeptide has detectable surface exposure on the second Gram positive bacteria strain or serotype but not the first Gram positive bacteria strain or serotype.

[1747] 113. The immunogenic composition of embodiment 105 wherein the Gram positive bacteria is S. pneumonaie, S. mutans, E. faecalis, E. faecium, C. difficile, L. monocytogenes, or C. diphtheriae.

[1748] 114. The immunogenic composition of any of embodiments 105-113 wherein the first and the second Gram positive bacteria AI polypeptides comprise a sortase substrate motif.

[1749] 115. The immunogenic composition of embodiment 114 wherein the sortase substrate motif is an LPXTG motif.

[1750] 116. The immunogenic composition of embodiment 115 wherein the LPXTG motif is represented by XXXXG, wherein the X at amino acid position 1 is an L, a V, an E, an I, an F, or a Q, wherein X at amino acid position 2 is a P if X at amino acid position 1 is an L, an I, or an F, wherein X at amino acid position 2 is a V if X at amino acid position 1 is a E or a Q, wherein X at amino acid position 2 is a V or a P if X at amino acid position 1 is a V, wherein X at amino acid position 3 is any amino acid residue, wherein X at amino acid position 4 is a T if X at amino acid position 1 is a V, E, I, F, or Q, and wherein X at amino acid position 4 is a T, S, or A if X at amino acid position 1 is an L.

[1751] 117. The immunogenic composition of embodiment 105 wherein the first Gram positive bacteria AI polypeptide is a first Group A Streptococcus (GAS) AI polypeptide.

[1752] 118. The immunogenic composition of embodiment 117 wherein the first GAS AI polypeptide comprises a sortase substrate motif.

[1753] 119. The immunogenic composition of embodiment 118 wherein the sortase substrate motif is an LPXTG motif.

[1754] 120. The immunogenic composition of embodiment 119 wherein the LPXTG motif is represented by XXXXG, wherein the X at the first amino acid position is an L, a V, an E, or a Q, wherein the X at the second amino acid position is P if the X at the first amino acid position is an L, the X at the second amino acid position is a V if the X at the first amino acid position is an E or a Q, or the X at the second amino acid position is a V or a P if the X at the first amino acid position is a V, wherein the X at the third amino acid position is any amino acid residue, and wherein the X at the fourth amino acid position is a T if the X at the first amino acid position is a V, an E, or a Q, or the X at the fourth amino acid position is a T, an S, or an A if the X at the first amino acid position is an L.

[1755] 121. The immunogenic composition of embodiment 117 wherein the first GAS AI polypeptide affects the ability of GAS bacteria to adhere to epithelial cells.

[1756] 122. The immunogenic composition of embodiment 117 wherein the first GAS AI polypeptide affects the ability of GAS bacteria to invade epithelial cells.

[1757] 123. The immunogenic composition of embodiment 117 wherein the first GAS AI polypeptide affects the ability of GAS bacteria to translocate through an epithelial cell layer.

[1758] 124. The immunogenic composition of embodiment 117 wherein the first GAS AI polypeptide is capable of associating with an epithelial cell surface.

[1759] 125. The immunogenic composition of embodiment 117 wherein the associating with an epithelial cell surface is binding to the epithelial cell surface.

[1760] 126. The immunogenic composition of embodiment 117 wherein the first GAS AI polypeptide is a full-length GAS AI protein.

[1761] 127. The immunogenic composition of embodiment 117 wherein the first GAS AI polypeptide is a fragment of a full-length GAS AI protein.

[1762] 128. The immunogenic composition of embodiment 127 wherein the fragment comprises at least 7 contiguous amino acid residues of the GAS AI protein.

[1763] 129. The immunogenic composition of embodiment 117 wherein the first GAS AI polypeptide is a first GAS AI-1 polypeptide.

[1764] 130. The immunogenic composition of embodiment 117 wherein the first GAS AI polypeptide is a first GAS AI-2 polypeptide.

[1765] 131. The immunogenic composition of embodiment 117 wherein the first GAS AI polypeptide is a first GAS AI-3 polypeptide.

[1766] 132. The immunogenic composition of embodiment 117 wherein the first GAS AI polypeptide is a first GAS AI-4 polypeptide.

[1767] 133. The immunogenic composition of any one of embodiments 117 or 129-132 wherein the second Gram positive bacteria AI polypeptide is a second GAS AI polypeptide.

[1768] 134. The immunogenic composition of embodiment 133 wherein the second GAS AI polypeptide is a second GAS AI-1 polypeptide.

[1769] 135. The immunogenic composition of embodiment 133 wherein the second GAS AI polypeptide is a second GAS AI-2 polypeptide.

[1770] 136. The immunogenic composition of embodiment 133 wherein the second GAS AI polypeptide is a second GAS AI-3 polypeptide.

[1771] 137. The immunogenic composition of embodiment 133 wherein the second GAS AI polypeptide is a second GAS AI-4 polypeptide.

[1772] 138. The immunogenic composition of embodiment 129 wherein the first GAS AI-1 polypeptide is selected from the group consisting of M6_Spy0157, M6_Spy0159, M6_Spy0160, CDC SS 410_fimbrial, ISS3650_fimbrial, DSM2071_fimbrial, and fragments thereof.

[1773] 139. The immunogenic composition of embodiment 130 wherein the first GAS AI-2 polypeptide is selected from the group consisting of GAS 15, GAS 16, GAS 18, and fragments thereof.

[1774] 140. The immunogenic composition of embodiment 131 wherein the first GAS AI-3 polypeptide is selected from the group consisting of SpyM3_{—}0098, SpyM3_{—}0100, SpyM3_{—}0102, SpyM3_{—}0104, SPs0100, SPs0102, SPs0104, SPs0106, orf78, orf80, orf82, orf84, spyM18_{—}0126, spyM18_{—}0128, spyM18_{—}0130, spyM18_{—}0132, SpyoM01000156, SpyoM01000155, SpyoM01000154, SpyoM01000153, SpyoM01000152, SpyoM01000151, SpyoM01000150, SpyoM01000149, ISS3040_fimbrial, ISS3776_fimbrial, ISS4959_fimbrial, and fragments thereof.

[1775] 141. The immunogenic composition of embodiment 132 wherein the first GAS AI-4 polypeptide is selected from the group consisting of 19224134, 19224135, 19224137, 19224139, 19224141, 20010296_fimbrial, 20020069_fimbrial, CDC SS 635_fimbrial, ISS4883_fimbrial, ISS4538_fimbrial, and fragments thereof.

[1776] 142. The immunogenic composition of embodiment 134 wherein the second GAS AI-1 polypeptide is selected from the group consisting of M6_Spy0157, M6_Spy0159, M6_Spy0160, CDC SS 410_fimbrial, ISS3650_fimbrial, DSM2071_fimbrial, and fragments thereof.

[1777] 143. The immunogenic composition of embodiment 135 wherein the second GAS AI-2 polypeptide is selected from the group consisting of GAS15, GAS16, GAS18, and fragments thereof.

[1778] 144. The immunogenic composition of embodiment 136 wherein the second GAS AI-3 polypeptide is selected from the group consisting of SpyM3_{—}0098, SpyM3_{—}0100, SpyM3_{—}0102, SpyM3_{—}0104, SPs0100, SPs0102, SPs0104, SPs0106, orf78, orf80, orf82, orf84, spyM18_{—}0126, spyM18_{—}0128, spyM18_{—}0130, spyM18_{—}0132, SpyoM01000156, SpyoM01000155, SpyoM01000154, SpyoM01000153, SpyoM01000152, SpyoM01000151, SpyoM01000150, SpyoM01000149, ISS3040_fimbrial, ISS3776_fimbrial, ISS4959_fimbrial, and fragments thereof.

[1779] 145. The immunogenic composition of embodiment 137 wherein the second GAS AI-4 polypeptide is selected from the group consisting of 19224134, 19224135, 19224137, 19224139, 19224141, 20010296_fimbrial, 20020069_fimbrial, CDC SS 635_fimbrial, ISS4883_fimbrial, ISS4538_fimbrial, and fragments thereof.

[1780] 146. The immunogenic composition of any one of embodiments 117-132 or 138-141 wherein the second Gram positive bacteria AI polypeptide is a Group B Streptococcus (GBS) AI polypeptide.

[1781] 147. The immunogenic composition of embodiment 146 wherein the GBS AI polypeptide comprises a sortase substrate motif.

[1782] 148. The immunogenic composition of embodiment 147 wherein the sortase substrate motif is an LPXTG motif.

[1783] 149. The immunogenic composition of embodiment 148 wherein the LPXTG motif is represented by the amino acid sequence XPXTG, wherein the X at amino acid position 1 is an L, an I, or an F and the X at amino acid position 3 is any amino acid residue.

[1784] 150. The immunogenic composition of embodiment 146 wherein the GBS AI polypeptide affects the ability of GBS bacteria to adhere to epithelial cells.

[1785] 151. The immunogenic composition of embodiment 146 wherein the GBS AI polypeptide affects the ability of GBS bacteria to invade epithelial cells.

[1786] 152. The immunogenic composition of embodiment 146 wherein the GBS AI polypeptide affects the ability of GBS bacteria to translocate through an epithelial cell layer.

[1787] 153. The immunogenic composition of embodiment 146 wherein the GBS AI polypeptide is capable of associating with an epithelial cell surface.

[1788] 154. The immunogenic composition of embodiment 146 wherein the associating with an epithelial cell surface is binding to the epithelial cell surface.

[1789] 155. The immunogenic composition of embodiment 146 wherein the GBS AI polypeptide is a full-length GBS AI protein.

[1790] 156. The immunogenic composition of embodiment 146 wherein the GBS AI polypeptide is a fragment of a full-length GBS AI protein.

[1791] 157. The immunogenic composition of embodiment 156 wherein the fragment comprises at least 7 contiguous amino acid residues of the GBS AI protein.

[1792] 158. The immunogenic composition of embodiment 146 wherein the GBS AI polypeptide is a GBS AI-1 polypeptide.

[1793] 159. The immunogenic composition of embodiment 146 wherein the GBS AI polypeptide is a GBS AI-2 polypeptide.

[1794] 160. The immunogenic composition of embodiment 158 wherein the GBS AI-1 polypeptide is selected from the group consisting of GBS 80, GBS 104, GBS 52, and fragments thereof.

[1795] 161. The immunogenic composition of embodiment 159 wherein the GBS AI-2 polypeptide is selected from the group consisting of GBS 59, GBS 67, GBS 150, 01521, 01523, 01524, and fragments thereof.

[1796] 162. The immunogenic composition of any one of embodiments 117-132 or 138-141 wherein the second Gram positive bacteria AI polypeptide is a Streptococcus pneumoniae AI polypeptide.

[1797] 163. The immunogenic composition of embodiment 162 wherein the S. pneumoniae AI polypeptide comprises a sortase substrate motif.

[1798] 164. The immunogenic composition of embodiment 163 wherein the sortase substrate motif is an LPXTG motif.

[1799] 165. The immunogenic composition of embodiment 162 wherein the S. pneumoniae AI polypeptide affects the ability of S. pneumoniae to adhere to epithelial cells.

[1800] 166. The immunogenic composition of embodiment 162 S. pneumoniae AI polypeptide affects the ability of S. pneumoniae to invade epithelial cells.

[1801] 167. The immunogenic composition of embodiment 162 wherein the S. pneumoniae AI polypeptide affects the ability of S. pneumoniae to translocate through an epithelial cell layer.

[1802] 168. The immunogenic composition of embodiment 162 wherein the S. pneumoniae AI polypeptide is capable of associating with an epithelial cell surface.

[1803] 169. The immunogenic composition of embodiment 168 wherein the associating with an epithelial cell surface is binding to the epithelial cell surface.

[1804] 170. The immunogenic composition of embodiment 162 wherein the S. pneumoniae AI polypeptide is a full-length S. pneumoniae AI protein.

[1805] 171. The immunogenic composition of embodiment 162 wherein the S. pneumoniae AI polypeptide is a fragment of a full-length S. pneumoniae AI protein.

[1806] 172. The immunogenic composition of embodiment 162 wherein the fragment comprises at least 7 contiguous amino acid residues of the S. pneumoniae AI protein.

[1807] 173. The immunogenic composition of embodiment 162 wherein the S. pneumoniae AI polypeptide is selected from the group consisting of SP0462, SP0463, SP0464, orf3_{—}670, orf4_{—}670, orf5_{—}670, ORF3_{—}14CSR, ORF4_{—}14CSR, ORF5_{—}14CSR, ORF3_{—}19AH, ORF4_{—}19AH, ORF5_{—}19AH, ORF3_{—}19FTW, ORF4_{—}19FTW, ORF5_{—}19FTW, ORF3_{—}23FP, ORF4_{—}23FP, ORF5_{—}23FP, ORF3_{—}23FTW, ORF4_{—}23FTW, ORF5_{—}23FTW, ORF3_{—}6BF, ORF4_{—}6BF, ORF5_{—}6BF, ORF3_{—}6BSP, ORF4_{—}6BSP, ORF5_{—}6BSP, ORF3_{—}9VSP, ORF4_{—}9VSP, ORF5_{—}9VSP, and fragments thereof.

[1808] 174. The immunogenic composition of any one of embodiments 105-117 wherein the first Gram positive bacteria AI polypeptide is in oligomeric form.

[1809] 175. The immunogenic composition of embodiment 174 wherein the oligomeric form is a hyperoligomer.

[1810] 176. The immunogenic composition of embodiment 174 wherein the second Gram positive bacteria AI polypeptide is in oligomeric form.

[1811] 177. The immunogenic composition of embodiment 176 wherein the oligomeric form is a hyperoligomer.

[1812] 178. The immunogenic composition of embodiment 176 wherein the first and the second Gram positive bacteria AI polypeptide are associated in a single oligomeric form.

[1813] 179. The immunogenic composition of embodiment 178 wherein the first and the second Gram positive bacteria AI polypeptide are chemically associated.

[1814] 180. The immunogenic composition of embodiment 178 wherein the first and the second Gram positive bacteria AI polypeptide are physically associated.

[1815] 181. The immunogenic composition of any one of embodiments 105-117 further comprising a Gram positive bacteria polypeptide not associated with an AI.

[1816] 182. The immunogenic composition of embodiment 181 wherein the Gram positive bacteria polypeptide not associated with an AI is selected from the group consisting of GBS 322 and GBS 276.

[1817] 183. The immunogenic composition of embodiment 182 wherein the Gram positive bacteria polypeptide not associated with an AI is GBS 322.

[1818] 184. A modified Gram positive bacterium adapted to produce increased levels of AI surface protein.

[1819] 185. The modified Gram positive bacterium of embodiment 184 wherein the AI surface protein is in oligomeric form.

[1820] 186. The modified Gram positive bacterium of embodiment 185 wherein the oligomeric form is a hyperoligomer.

[1821] 187. The modified Gram positive bacterium of any one of embodiments 184-186 which is a Group B Streptococcus bacterium.

[1822] 188. The modified Gram positive bacterium of any one of embodiments 184-186 which is a Group A Streptococcus bacterium.

[1823] 189. The modified Gram positive bacterium of any one of embodiments 184-186 which is a non-pathogenic Gram positive bacterium.

[1824] 190. The modified Gram positive bacterium of embodiment 189 wherein the non-pathogenic Gram positive bacterium is Streptococus gordonii.

[1825] 191. The modified Gram positive bacterium of embodiment 189 wherein the non-pathogenic Gram positive bacterium is Lactococcus lactis.

[1826] 192. The modified Gram positive bacterium of any one of embodiments 184-186 which has been inactivated and wherein the AI surface protein is exposed on the surface of the Gram positive bacterium.

[1827] 193. The modified Gram positive bacterium of any one of embodiments 184-186 which has been attenuated and wherein the AI surface protein is exposed on the surface of the Gram positive bacterium.

[1828] 194. The modified GBS bacterium of embodiment 187 which has been inactivated and wherein the AI surface protein is exposed on the surface of the GBS bacterium.

[1829] 195. The modified GBS bacterium of embodiment 187 which has been attenuated and wherein the AI surface protein is exposed on the surface of the GBS bacterium.

[1830] 196. The modified GAS bacterium of embodiment 188 which has been inactivated and wherein the AI surface protein is exposed on the surface of the GAS bacterium.

[1831] 197. The modified GAS bacterium of embodiment 188 which has been attenuated and wherein the AI surface protein is exposed on the surface of the GAS bacterium.

[1832] 198. The modified non-pathogenic bacterium of embodiment 189 which has been inactivated and wherein the AI surface protein is exposed on the surface of the non-pathogenic Gram positive bacterium.

[1833] 199. The modified non-pathogenic bacterium of embodiment 189 which has been attenuated and wherein the AI surface protein is exposed on the surface of the non-pathogenic Gram positive bacterium.

[1834] 200. A method for manufacturing an oligomeric adhesin island (AI) surface antigen comprising:

[1835] culturing a Gram positive bacterium that expresses an oligomeric AI surface antigen and

[1836] isolating the expressed oligomeric AI surface antigen.

[1837] 201. The method of embodiment 200 wherein the step of isolating is performed by collecting said oligomeric AI surface antigen from Gram positive bacterium secretions in the Gram positive bacterium culture.

[1838] 202. The method of embodiment 200 further comprising a step of purifying.

[1839] 203. The method of embodiment 202 wherein the oligomeric AI surface antigen is purified from the Gram positive bacterium cell surface.

[1840] 204. The method of embodiment 200 wherein the Gram positive bacterium is adapted for increased AI protein expression.

[1841] 205. The method of any one of embodiments 200-204 wherein the Gram positive bacterium is a Group A Streptococcus bacterium.

[1842] 206. The method of any one of embodiments 200-204 wherein the Gram positive bacterium is a Group B Streptococcus bacterium.

[1843] 207. The method of any one of embodiments 200-204 wherein the oligomeric AI surface antigen is in hyperoligomeric form.

[1844] 208. The method of embodiment 200 wherein the Gram positive bacterium expresses the oligomeric AI surface antigen recombinantly.

[1845] 209. The method of embodiment 208 wherein the Gram positive bacterium further manipulated expresses at least 1 AI sortase.

[1846] 210. The modified Gram positive bacterium of any one of embodiments 184-186 which is a S. pneumoniae bacterium.

[1847] 211. The method of any one of embodiments 200-204 wherein the Gram positive bacterium is S. pneumoniae.

We claim:

1. An immunogenic composition comprising a purified Group B Streptococcus (GBS) adhesin island (AI) polypeptide in oligomeric form.

2. The immunogenic composition of claim 1 wherein the GBS AI polypeptide is selected from a GBS AI-1.

3. The immunogenic composition of claim 1 wherein the GBS AI polypeptide is selected from a GBS AI-2.

4. The immunogenic composition of claim 2 wherein the GBS AI polypeptide is selected from the group consisting of GBS 80, GBS 104, GBS 52, and fragments thereof.

5. The immunogenic composition of claim 3 wherein the GBS AI polypeptide is selected from the group consisting of GBS 59, GBS 67, GBS 150, 01521, 01523, 01524, and fragments thereof.

6. The immunogenic composition of claim 4 wherein the GBS AI polypeptide is GBS 80.

7. The immunogenic composition of any of claims 1-6 wherein the oligomeric form is a hyperoligomer.

8 (22). An immunogenic composition comprising a purified Gram positive bacteria adhesin island (AI) polypeptide in an oligomeric form.

9 (23). The immunogenic composition of claim 8 wherein the Gram positive bacteria is of a genus selected from the group consisting of Streptococcus, Enterococcus, Staphylococcus, Clostridium, Corynebacterium, or Listeria.

10 (24). The immunogenic composition of claim 9 wherein the Gram positive bacteria is of the genus Streptococcus.

11 (35). The immunogenic composition of claim 10 wherein the genus Streptococcus bacteria is Group A Streptococcus (GAS) bacteria and the Gram positive bacteria AI polypeptide is a GAS AI polypeptide.

12 (36). The immunogenic composition of claim 11 wherein the GAS AI polypeptide is selected from a GAS AI-1.

13 (37). The immunogenic composition of claim 11 wherein the GAS AI polypeptide is selected from a GAS AI-2.

14 (38). The immunogenic composition of claim 11 wherein the GAS AI polypeptide is selected from a GAS AI-3.

15 (39). The immunogenic composition of claim 11 wherein the GAS AI polypeptide is selected from a GAS AI-4.

16 (66). The immunogenic composition of any one of claims 8-15 wherein the oligomeric form is a hyperoligomer.

17. An immunogenic composition comprising a first and a second Group B Streptococcus (GBS) adhesin island (AI) polypeptide.

18. The immunogenic composition of claim 17 wherein the first GBS AI polypeptide is encoded by a GBS AI-1.

19. The immunogenic composition of claim 18 wherein the second GBS AI polypeptide is encoded by a GBS AI-2.

20. The immunogenic composition of claim 18 wherein the first GBS AI polypeptide is selected from the group consisting of GBS 80, GBS 104, GBS 52, and fragments thereof.

21. The immunogenic composition of claim 19 wherein the second GBS AI polypeptide is selected from the group consisting of GBS 59, GBS 67, GBS 150, 01521, 01523, 01524, and fragments thereof, and wherein the first and the second GBS AI polypeptide are not the same polypeptide.

22. The immunogenic composition of claim 19 wherein the first GBS AI polypeptide is GBS 80 and the second GBS AI polypeptide is GBS 67.

23. An immunogenic composition comprising a first and a second Gram positive bacteria adhesin island (AI) polypeptide.

24. The immunogenic composition of claim 23 wherein the Gram positive bacteria is Streptococcus, Enterococcus, Staphylococcus, Clostridium, Corynebacterium, or Listeria.

25. The immunogenic composition of claim 23 wherein the first Gram positive bacteria AI polypeptide is a first Group A Streptococcus (GAS) AI polypeptide.

26. The immunogenic composition of claim 25 wherein the first GAS AI polypeptide is a first GAS AI-1 polypeptide.

27. The immunogenic composition of claim 25 wherein the first GAS AI polypeptide is a first GAS AI-2 polypeptide.

28. The immunogenic composition of claim 25 wherein the first GAS AI polypeptide is a first GAS AI-3 polypeptide.

29. The immunogenic composition of claim 25 wherein the first GAS AI polypeptide is a first GAS AI-4 polypeptide.

30. The immunogenic composition of any one of claims 25-29 wherein the second Gram positive bacteria AI polypeptide is a second GAS AI polypeptide.

31. The immunogenic composition of claim 30 wherein the second GAS AI polypeptide is a second GAS AI-1 polypeptide.

32. The immunogenic composition of claim 30 wherein the second GAS AI polypeptide is a second GAS AI-2 polypeptide.

33. The immunogenic composition of claim 30 wherein the second GAS AI polypeptide is a second GAS AI-3 polypeptide.

34. The immunogenic composition of claim 30 wherein the second GAS AI polypeptide is a second GAS AI-4 polypeptide.

35. A modified Gram positive bacterium adapted to produce increased levels of AI surface protein.

36. The modified Gram positive bacterium of claim 35 wherein the AI surface protein is in oligomeric form.

37. The modified Gram positive bacterium of claim 36 wherein the oligomeric form is a hyperoligomer.

38. The modified Gram positive bacterium of any one of claims 35-37 which is a non-pathogenic Gram positive bacterium.

39. The modified Gram positive bacterium of claim 38 wherein the non-pathogenic Gram positive bacterium is Lactococcus lactis.

40. A method for manufacturing an oligomeric adhesin island (AI) surface antigen comprising:
culturing a Gram positive bacterium that expresses an oligomeric AI surface antigen and
isolating the expressed oligomeric AI surface antigen.

The application's sequence listing, which the Patent Office published only in electronic form, follows.

SEQUENCE LISTING (273 sequences)

SEQ ID NO: 1 - DNA, 1662 bp, Streptococcus agalactiae
atgaaattatcgaagaagttattgttttcggctgctgttttaacaatggtggcggggtcaactgttgaaccagtagctcagtttgcgactggaatgagtattgtaagagctgcagaagtgtcacaagaacgcccagcgaaaacaacagtaaatatctataaattacaagctgatagttataaatcggaaattacttctaatggtggtatcgagaataaagacggcgaagtaatatctaactatgctaaacttggtgacaatgtaaaaggtttgcaaggtgtacagtttaaacgttataaagtcaagacggatatttctgttgatgaattgaaaaaattgacaacagttgaagcagcagatgcaaaagttggaacgattcttgaagaaggtgtcagtctacctcaaaaaactaatgctcaaggtttggtcgtcgatgctctggattcaaaaagtaatgtgagatacttgtatgtagaagatttaaagaattcaccttcaaacattaccaaagcttatgctgtaccgtttgtgttggaattaccagttgctaactctacaggtacaggtttcctttctgaaattaatatttaccctaaaaacgttgtaactgatgaaccaaaaacagataaagatgttaaaaaattaggtcaggacgatgcaggttatacgattggtgaagaattcaaatggttcttgaaatctacaatccctgccaatttaggtgactatgaaaaatttgaaattactgataaatttgcagatggcttgacttataaatctgttggaaaaatcaagattggttcgaaaacactgaatagagatgagcactacactattgatgaaccaacagttgataaccaaaatacattaaaaattacgtttaaaccagagaaatttaaagaaattgctgagctacttaaaggaatgacccttgttaaaaatcaagatgctcttgataaagctactgcaaatacagatgatgcggcatttttggaaattccagttgcatcaactattaatgaaaaagcagttttaggaaaagcaattgaaaatacttttgaacttcaatatgaccatactcctgataaagctgacaatccaaaaccatctaatcctccaagaaaaccagaagttcatactggtgggaaacgatttgtaaagaaagactcaacagaaacacaaacactaggtggtgctgagtttgatttgttggcttctgatgggacagcagtaaaatggacagatgctcttattaaagcgaatactaataaaaactatattgctggagaagctgttactgggcaaccaatcaaattgaaatcacatacagacggtacgtttgagattaaaggtttggcttatgcagttgatgcgaatgcagagggtacagcagtaacttacaaattaaaagaaacaaaagcaccagaaggttatgtaatccctgataaagaaatcgagtttacagtatcacaaacatcttataatacaaaaccaactgacatcacggttgatagtgctgatgcaacacctgatacaattaaaaacaacaaacgtccttcaatccctaatactggtggtattggtacggctatctttgtcgctatcggtgctgcggtgatggcttttgctgttaaggggatgaagcgtcgtacaaaagataac

SEQ ID NO: 2 - protein, 554 aa, Streptococcus agalactiae
MKLSKKLLFSAAVLTMVAGSTVEPVAQFATGMSIVRAAEVSQERPAKTTVNIYKLQADSYKSEITSNGGIENKDGEVISNYAKLGDNVKGLQGVQFKRYKVKTDISVDELKKLTTVEAADAKVGTILEEGVSLPQKTNAQGLVVDALDSKSNVRYLYVEDLKNSPSNITKAYAVPFVLELPVANSTGTGFLSEINIYPKNVVTDEPKTDKDVKKLGQDDAGYTIGEEFKWFLKSTIPANLGDYEKFEITDKFADGLTYKSVGKIKIGSKTLNRDEHYTIDEPTVDNQNTLKITFKPEKFKEIAELLKGMTLVKNQDALDKATANTDDAAFLEIPVASTINEKAVLGKAIENTFELQYDHTPDKADNPKPSNPPRKPEVHTGGKRFVKKDSTETQTLGGAEFDLLASDGTAVKWTDALIKANTNKNYIAGEAVTGQPIKLKSHTDGTFEIKGLAYAVDANAEGTAVTYKLKETKAPEGYVIPDKEIEFTVSQTSYNTKPTDITVDSADATPDTIKNNKRPSIPNTGGIGTAIFVAIGAAVMAFAVKGMKRRTKDN

SEQ ID NO: 3 - protein, 517 aa, Streptococcus agalactiae
AEVSQERPAKTTVNIYKLQADSYKSEITSNGGIENKDGEVISNYAKLGDNVKGLQGVQFKRYKVKTDISVDELKKLTTVEAADAKVGTILEEGVSLPQKTNAQGLVVDALDSKSNVRYLYVEDLKNSPSNITKAYAVPFVLELPVANSTGTGFLSEINIYPKNVVTDEPKTDKDVKKLGQDDAGYTIGEEFKWFLKSTIPANLGDYEKFEITDKFADGLTYKSVGKIKIGSKTLNRDEHYTIDEPTVDNQNTLKITFKPEKFKEIAELLKGMTLVKNQDALDKATANTDDAAFLEIPVASTINEKAVLGKAIENTFELQYDHTPDKADNPKPSNPPRKPEVHTGGKRFVKKDSTETQTLGGAEFDLLASDGTAVKWTDALIKANTNKNYIAGEAVTGQPIKLKSHTDGTFEIKGLAYAVDANAEGTAVTYKLKETKAPEGYVIPDKEIEFTVSQTSYNTKPTDITVDSADATPDTIKNNKRPSIPNTGGIGTAIFVAIGAAVMAFAVKGMKRRTKDN

SEQ ID NO: 4 - protein, 525 aa, Streptococcus agalactiae
MKLSKKLLFSAAVLTMVAGSTVEPVAQFATGMSIVRAAEVSQERPAKTTVNIYKLQADSYKSEITSNGGIENKDGEVISNYAKLGDNVKGLQGVQFKRYKVKTDISVDELKKLTTVEAADAKVGTILEEGVSLPQKTNAQGLVVDALDSKSNVRYLYVEDLKNSPSNITKAYAVPFVLELPVANSTGTGFLSEINIYPKNVVTDEPKTDKDVKKLGQDDAGYTIGEEFKWFLKSTIPANLGDYEKFEITDKFADGLTYKSVGKIKIGSKTLNRDEHYTIDEPTVDNQNTLKITFKPEKFKEIAELLKGMTLVKNQDALDKATANTDDAAFLEIPVASTINEKAVLGKAIENTFELQYDHTPDKADNPKPSNPPRKPEVHTGGKRFVKKDSTETQTLGGAEFDLLASDGTAVKWTDALIKANTNKNYIAGEAVTGQPIKLKSHTDGTFEIKGLAYAVDANAEGTAVTYKLKETKAPEGYVIPDKEIEFTVSQTSYNTKPTDITVDSADATPDTIKNNKRPSIPNTG

SEQ ID NO: 5 - protein, 5 aa, Artificial
  cell wall anchor motif
IPNTG

SEQ ID NO: 6 - protein, 520 aa, Streptococcus agalactiae
MKLSKKLLFSAAVLTMVAGSTVEPVAQFATGMSIVRAAEVSQERPAKTTVNIYKLQADSYKSEITSNGGIENKDGEVISNYAKLGDNVKGLQGVQFKRYKVKTDISVDELKKLTTVEAADAKVGTILEEGVSLPQKTNAQGLVVDALDSKSNVRYLYVEDLKNSPSNITKAYAVPFVLELPVANSTGTGFLSEINIYPKNVVTDEPKTDKDVKKLGQDDAGYTIGEEFKWFLKSTIPANLGDYEKFEITDKFADGLTYKSVGKIKIGSKTLNRDEHYTIDEPTVDNQNTLKITFKPEKFKEIAELLKGMTLVKNQDALDKATANTDDAAFLEIPVASTINEKAVLGKAIENTFELQYDHTPDKADNPKPSNPPRKPEVHTGGKRFVKKDSTETQTLGGAEFDLLASDGTAVKWTDALIKANTNKNYIAGEAVTGQPIKLKSHTDGTFEIKGLAYAVDANAEGTAVTYKLKETKAPEGYVIPDKEIEFTVSQTSYNTKPTDITVDSADATPDTIKNNKRPS

SEQ ID NO: 7 - protein, 483 aa, Streptococcus agalactiae
AEVSQERPAKTTVNIYKLQADSYKSEITSNGGIENKDGEVISNYAKLGDNVKGLQGVQFKRYKVKTDISVDELKKLTTVEAADAKVGTILEEGVSLPQKTNAQGLVVDALDSKSNVRYLYVEDLKNSPSNITKAYAVPFVLELPVANSTGTGFLSEINIYPKNVVTDEPKTDKDVKKLGQDDAGYTIGEEFKWFLKSTIPANLGDYEKFEITDKFADGLTYKSVGKIKIGSKTLNRDEHYTIDEPTVDNQNTLKITFKPEKFKEIAELLKGMTLVKNQDALDKATANTDDAAFLEIPVASTINEKAVLGKAIENTFELQYDHTPDKADNPKPSNPPRKPEVHTGGKRFVKKDSTETQTLGGAEFDLLASDGTAVKWTDALIKANTNKNYIAGEAVTGQPIKLKSHTDGTFEIKGLAYAVDANAEGTAVTYKLKETKAPEGYVIPDKEIEFTVSQTSYNTKPTDITVDSADATPDTIKNNKRPS

SEQ ID NO: 8 - protein, 271 aa, Streptococcus agalactiae
AEVSQERPAKTTVNIYKLQADSYKSEITSNGGIENKDGEVISNYAKLGDNVKGLQGVQFKRYKVKTDISVDELKKLTTVEAADAKVGTILEEGVSLPQKTNAQGLVVDALDSKSNVRYLYVEDLKNSPSNITKAYAVPFVLELPVANSTGTGFLSEINIYPKNVVTDEPKTDKDVKKLGQDDAGYTIGEEFKWFLKSTIPANLGDYEKFEITDKFADGLTYKSVGKIKIGSKTLNRDEHYTIDEPTVDNQNTLKITFKPEKFKEIAELLKG

SEQ ID NO: 9 - protein, 212 aa, Streptococcus agalactiae
MTLVKNQDALDKATANTDDAAFLEIPVASTINEKAVLGKAIENTFELQYDHTPDKADNPKPSNPPRKPEVHTGGKRFVKKDSTETQTLGGAEFDLLASDGTAVKWTDALIKANTNKNYIAGEAVTGQPIKLKSHTDGTFEIKGLAYAVDANAEGTAVTYKLKETKAPEGYVIPDKEIEFTVSQTSYNTKPTDITVDSADATPDTIKNNKRPS

SEQ ID NO: 10 - DNA, 2670 bp, Streptococcus agalactiae
atgaaaaagagacaaaaaatatggagagggttatcagttactttactaatcctgtcccaaattccatttggtatattggtacaaggtgaaacccaagataccaatcaagcacttggaaaagtaattgttaaaaaaacgggagacaatgctacaccattaggcaaagcgacttttgtgttaaaaaatgacaatgataagtcagaaacaagtcacgaaacggtagagggttctggagaagcaacctttgaaaacataaaacctggagactacacattaagagaagaaacagcaccaattggttataaaaaaactgataaaacctggaaagttaaagttgcagataacggagcaacaataatcgagggtatggatgcagataaagcagagaaacgaaaagaagttttgaatgcccaatatccaaaatcagctatttatgaggatacaaaagaaaattacccattagttaatgtagagggttccaaagttggtgaacaatacaaagcattgaatccaataaatggaaaagatggtcgaagagagattgctgaaggttggttatcaaaaaaaattacaggggtcaatgatctcgataagaataaatataaaattgaattaactgttgagggtaaaaccactgttgaaacgaaagaacttaatcaaccactagatgtcgttgtgctattagataattcaaatagtatgaataatgaaagagccaataattctcaaagagcattaaaagctggggaagcagttgaaaagctgattgataaaattacatcaaataaagacaatagagtagctcttgtgacatatgcctcaaccatttttgatggtactgaagcgaccgtatcaaagggagttgccgatcaaaatggtaaagcgctgaatgatagtgtatcatgggattatcataaaactacttttacagcaactacacataattacagttatttaaatttaacaaatgatgctaacgaagttaatattctaaagtcaagaattccaaaggaagcggagcatataaatggggatcgcacgctctatcaatttggtgcgacatttactcaaaaagctctaatgaaagcaaatgaaattttagagacacaaagttctaatgctagaaaaaaacttatttttcacgtaactgatggtgtccctacgatgtcttatgccataaattttaatccttatatatcaacatcttaccaaaaccagtttaattcttttttaaataaaataccagatagaagtggtattctccaagaggattttataatcaatggtgatgattatcaaatagtaaaaggagatggagagagttttaaactgttttcggatagaaaagttcctgttactggaggaacgacacaagcagcttatcgagtaccgcaaaatcaactctctgtaatgagtaatgagggatatgcaattaatagtggatatatttatctctattggagagattacaactgggtctatccatttgatcctaagacaaagaaagtttctgcaacgaaacaaatcaaaactcatggtgagccaacaacattatactttaatggaaatataagacctaaaggttatgacatttttactgttgggattggtgtaaacggagatcctggtgcaactcctcttgaagctgagaaatttatgcaatcaatatcaagtaaaacagaaaattatactaatgttgatgatacaaataaaatttatgatgagctaaataaatactttaaaacaattgttgaggaaaaacattctattgttgatggaaatgtgactgatcctatgggagagatgattgaattccaattaaaaaatggtcaaagttttacacatgatgattacgttttggttggaaatgatggcagtcaattaaaaaatggtgtggctcttggtggaccaaacagtgatgggggaattttaaaagatgttacagtgacttatgataagacatctcaaaccatcaaaatcaatcatttgaacttaggaagtggacaaaaagtagttcttacctatgatgtacgtttaaaagataactatataagtaacaaattttacaatacaaataatcgtacaacgctaagtccgaagagtgaaaaagaaccaaatactattcgtgatttcccaattcccaaaattcgtgatgttcgtgagtttccggtactaaccatcagtaatcagaagaaaatgggtgaggttgaatttattaaagttaataaagacaaacattcagaatcgcttttgggagctaagtttcaacttcagatagaaaaagatttttctgggtataagcaatttgttccagagggaagtgatgttacaacaaagaatgatggtaaaatttattttaaagcacttcaagatggtaactataaattatatgaaatttcaagtccagatggctatatagaggttaaaacgaaacctgttgtgacatttacaattcaaaatggagaagttacgaacctgaaagcagatccaaatgctaataaaaatcaaatcgggtatcttgaaggaaatggtaaacatcttattaccaacactcccaaacgcccaccaggtgtttttcctaaaacagggggaattggtacaattgtctatatattagttggttctacttttatgatacttaccatttgttctttccgtcgtaaacaattg

SEQ ID NO: 11 - protein, 890 aa, Streptococcus agalactiae
MKKRQKIWRGLSVTLLILSQIPFGILVQGETQDTNQALGKVIVKKTGDNATPLGKATFVLKNDNDKSETSHETVEGSGEATFENIKPGDYTLREETAPIGYKKTDKTWKVKVADNGATIIEGMDADKAEKRKEVLNAQYPKSAIYEDTKENYPLVNVEGSKVGEQYKALNPINGKDGRREIAEGWLSKKITGVNDLDKNKYKIELTVEGKTTVETKELNQPLDVVVLLDNSNSMNNERANNSQRALKAGEAVEKLIDKITSNKDNRVALVTYASTIFDGTEATVSKGVADQNGKALNDSVSWDYHKTTFTATTHNYSYLNLTNDANEVNILKSRIPKEAEHINGDRTLYQFGATFTQKALMKANEILETQSSNARKKLIFHVTDGVPTMSYAINFNPYISTSYQNQFNSFLNKIPDRSGILQEDFIINGDDYQIVKGDGESFKLFSDRKVPVTGGTTQAAYRVPQNQLSVMSNEGYAINSGYIYLYWRDYNWVYPFDPKTKKVSATKQIKTHGEPTTLYFNGNIRPKGYDIFTVGIGVNGDPGATPLEAEKFMQSISSKTENYTNVDDTNKIYDELNKYFKTIVEEKHSIVDGNVTDPMGEMIEFQLKNGQSFTHDDYVLVGNDGSQLKNGVALGGPNSDGGILKDVTVTYDKTSQTIKINHLNLGSGQKVVLTYDVRLKDNYISNKFYNTNNRTTLSPKSEKEPNTIRDFPIPKIRDVREFPVLTISNQKKMGEVEFIKVNKDKHSESLLGAKFQLQIEKDFSGYKQFVPEGSDVTTKNDGKIYFKALQDGNYKLYEISSPDGYIEVKTKPVVTFTIQNGEVTNLKADPNANKNQIGYLEGNGKHLITNTPKRPPGVFPKTGGIGTIVYILVGSTFMILTICSFRRKQL

SEQ ID NO: 12 - protein, 862 aa, Streptococcus agalactiae
GETQDTNQALGKVIVKKTGDNATPLGKATFVLKNDNDKSETSHETVEGSGEATFENIKPGDYTLREETAPIGYKKTDKTWKVKVADNGATIIEGMDADKAEKRKEVLNAQYPKSAIYEDTKENYPLVNVEGSKVGEQYKALNPINGKDGRREIAEGWLSKKITGVNDLDKNKYKIELTVEGKTTVETKELNQPLDVVVLLDNSNSMNNERANNSQRALKAGEAVEKLIDKITSNKDNRVALVTYASTIFDGTEATVSKGVADQNGKALNDSVSWDYHKTTFTATTHNYSYLNLTNDANEVNILKSRIPKEAEHINGDRTLYQFGATFTQKALMKANEILETQSSNARKKLIFHVTDGVPTMSYAINFNPYISTSYQNQFNSFLNKIPDRSGILQEDFIINGDDYQIVKGDGESFKLFSDRKVPVTGGTTQAAYRVPQNQLSVMSNEGYAINSGYIYLYWRDYNWVYPFDPKTKKVSATKQIKTHGEPTTLYFNGNIRPKGYDIFTVGIGVNGDPGATPLEAEKFMQSISSKTENYTNVDDTNKIYDELNKYFKTIVEEKHSIVDGNVTDPMGEMIEFQLKNGQSFTHDDYVLVGNDGSQLKNGVALGGPNSDGGILKDVTVTYDKTSQTIKINHLNLGSGQKVVLTYDVRLKDNYISNKFYNTNNRTTLSPKSEKEPNTIRDFPIPKIRDVREFPVLTISNQKKMGEVEFIKVNKDKHSESLLGAKFQLQIEKDFSGYKQFVPEGSDVTTKNDGKIYFKALQDGNYKLYEISSPDGYIEVKTKPVVTFTIQNGEVTNLKADPNANKNQIGYLEGNGKHLITNTPKRPPGVFPKTGGIGTIVYILVGSTFMILTICSFRRKQL

SEQ ID NO: 13 - protein, 851 aa, Streptococcus agalactiae
MKKRQKIWRGLSVTLLILSQIPFGILVQGETQDTNQALGKVIVKKTGDNATPLGKATFVLKNDNDKSETSHETVEGSGEATFENIKPGDYTLREETAPIGYKKTDKTWKVKVADNGATIIEGMDADKAEKRKEVLNAQYPKSAIYEDTKENYPLVNVEGSKVGEQYKALNPINGKDGRREIAEGWLSKKITGVNDLDKNKYKIELTVEGKTTVETKELNQPLDVVVLLDNSNSMNNERANNSQRALKAGEAVEKLIDKITSNKDNRVALVTYASTIFDGTEATVSKGVADQNGKALNDSVSWDYHKTTFTATTHNYSYLNLTNDANEVNILKSRIPKEAEHINGDRTLYQFGATFTQKALMKANEILETQSSNARKKLIFHVTDGVPTMSYAINFNPYISTSYQNQFNSFLNKIPDRSGILQEDFIINGDDYQIVKGDGESFKLFSDRKVPVTGGTTQAAYRVPQNQLSVMSNEGYAINSGYIYLYWRDYNWVYPFDPKTKKVSATKQIKTHGEPTTLYFNGNIRPKGYDIFTVGIGVNGDPGATPLEAEKFMQSISSKTENYTNVDDTNKIYDELNKYFKTIVEEKHSIVDGNVTDPMGEMIEFQLKNGQSFTHDDYVLVGNDGSQLKNGVALGGPNSDGGILKDVTVTYDKTSQTIKINHLNLGSGQKVVLTYDVRLKDNYISNKFYNTNNRTTLSPKSEKEPNTIRDFPIPKIRDVREFPVLTISNQKKMGEVEFIKVNKDKHSESLLGAKFQLQIEKDFSGYKQFVPEGSDVTTKNDGKIYFKALQDGNYKLYEISSPDGYIEVKTKPVVTFTIQNGEVTNLKADPNANKNQIGYLEGNGKHLITNT

SEQ ID NO: 14 - protein, 823 aa, Streptococcus agalactiae
GETQDTNQALGKVIVKKTGDNATPLGKATFVLKNDNDKSETSHETVEGSGEATFENIKPGDYTLREETAPIGYKKTDKTWKVKVADNGATIIEGMDADKAEKRKEVLNAQYPKSAIYEDTKENYPLVNVEGSKVGEQYKALNPINGKDGRREIAEGWLSKKITGVNDLDKNKYKIELTVEGKTTVETKELNQPLDVVVLLDNSNSMNNERANNSQRALKAGEAVEKLIDKITSNKDNRVALVTYASTIFDGTEATVSKGVADQNGKALNDSVSWDYHKTTFTATTHNYSYLNLTNDANEVNILKSRIPKEAEHINGDRTLYQFGATFTQKALMKANEILETQSSNARKKLIFHVTDGVPTMSYAINFNPYISTSYQNQFNSFLNKIPDRSGILQEDFIINGDDYQIVKGDGESFKLFSDRKVPVTGGTTQAAYRVPQNQLSVMSNEGYAINSGYIYLYWRDYNWVYPFDPKTKKVSATKQIKTHGEPTTLYFNGNIRPKGYDIFTVGIGVNGDPGATPLEAEKFMQSISSKTENYTNVDDTNKIYDELNKYFKTIVEEKHSIVDGNVTDPMGEMIEFQLKNGQSFTHDDYVLVGNDGSQLKNGVALGGPNSDGGILKDVTVTYDKTSQTIKINHLNLGSGQKVVLTYDVRLKDNYISNKFYNTNNRTTLSPKSEKEPNTIRDFPIPKIRDVREFPVLTISNQKKMGEVEFIKVNKDKHSESLLGAKFQLQIEKDFSGYKQFVPEGSDVTTKNDGKIYFKALQDGNYKLYEISSPDGYIEVKTKPVVTFTIQNGEVTNLKADPNANKNQIGYLEGNGKHLITNT

SEQ ID NO: 15 - DNA, 2703 bp, Streptococcus agalactiae
atgagaaaataccaaaaattttctaaaatattgacgttaagtcttttttgtttgtcgcaaataccgcttaataccaatgttttaggggaaagtaccgtaccggaaaatggtgctaaaggaaagttagttgttaaaaagacagatgaccagaacaaaccactttcaaaagctacctttgttttaaaaactactgctcatccagaaagtaaaatagaaaaagtaactgctgagctaacaggtgaagctacttttgataatctcatacctggagattatactttatcagaagaaacagcgcccgaaggttataaaaagactaaccagacttggcaagttaaggttgagagtaatggaaaaactacgatacaaaatagtggtgataaaaattccacaattggacaaaatcaggaagaactagataagcagtatccccccacaggaatttatgaagatacaaaggaatcttataaacttgagcatgttaaaggttcagttccaaatggaaagtcagaggcaaaagcagttaacccatattcaagtgaaggtgagcatataagagaaattccagagggaacattatctaaacgtatttcagaagtaggtgatttagctcataataaatataaaattgagttaactgtcagtggaaaaaccatagtaaaaccagtggacaaacaaaagccgttagatgttgtcttcgtactcgataattctaactcaatgaataacgatggcccaaattttcaaaggcataataaagccaagaaagctgccgaagctcttgggaccgcagtaaaagatattttaggagcaaacagtgataatagggttgcattagttacctatggttcagatatttttgatggtaggagtgtagatgtcgtaaaaggatttaaagaagatgataaatattatggccttcaaactaagttcacaattcagacagagaattatagtcataaacaattaacaaataatgctgaagagattataaaaaggattccgacagaagctcctaaagctaagtggggatctactaccaatggattaactccagagcaacaaaaggagtactatcttagtaaagtaggagaaacatttactatgaaagccttcatggaggcagatgatattttgagtcaagtaaatcgaaatagtcaaaaaattattgttcatgtaactgatggtgttcctacgagatcatatgctattaataattttaaactgggtgcatcatatgaaagccaatttgaacaaatgaaaaaaaatggatatctaaataaaagtaattttctacttactgataagcccgaggatataaaaggaaatggggagagttactttttgtttcccttagatagttatcaaacacagataatctctggaaacttacaaaaacttcattatttagatttaaatcttaattaccctaaaggtacaatttatcgaaatggaccagtgaaagaacatggaacaccaaccaaactttatataaatagtttaaaacagaaaaattatgacatttttaattttggtatcgatatatctggttttagacaagtttataatgaggagtataagaaaaatcaagatggtacttttcaaaaattgaaagaggaagcttttaaactttcagatggagaaatcacagaactaatgaggtcgttctcttccaaacctgagtactacacccctatcgtaacttcagccgatacatctaacaatgaaattttatctaaaattcagcaacaatttgaaacgattttaacaaaagaaaactcaattgttaatggaactatcgaagatcctatgggtgataaaatcaatttacagcttggtaatggacaaacattacagccaagtgattatactttacagggaaatgatggaagtgtaatgaaggatggtattgcaactggtgggcctaataatgatggtggaatacttaagggggttaaattagaatacatcggaaataaactctatgttagaggtttgaatttaggagaaggtcaaaaagtaacactcacatatgatgtgaaactagatgacagttttataagtaacaaattctatgacactaatggtagaacaacattgaatcctaagtcagaggatcctaatacacttagagattttccaatccctaaaattcgtgatgtgagagaatatcctacaataacgattaaaaacgagaagaagttaggtgaaattgaatttataaaagttgataaagataataataagttgcttctcaaaggagctacgtttgaacttcaagaatttaatgaagattataaactttatttaccaataaaaaataataattcaaaagtagtgacgggagaaaacggcaaaatttcttacaaagatttgaaagatggcaaatatcagttaatagaagcagtttcgccggaggattatcaaaaaattactaataaaccaattttaacttttgaagtggttaaaggatcgataaaaaatataatagctgttaataaacagatttctgaatatcatgaggaaggtgacaagcatttaattaccaacacgcatattccaccaaaaggaattattcctatgacaggtgggaaaggaattctatctttcattttaataggtggagctatgatgtctattgcaggtggaatttatatttggaaaaggtataagaaatctagtgatatgtccatcaaaaaagat

SEQ ID NO: 16 - protein, 901 aa, Streptococcus agalactiae
MRKYQKFSKILTLSLFCLSQIPLNTNVLGESTVPENGAKGKLVVKKTDDQNKPLSKATFVLKTTAHPESKIEKVTAELTGEATFDNLIPGDYTLSEETAPEGYKKTNQTWQVKVESNGKTTIQNSGDKNSTIGQNQEELDKQYPPTGIYEDTKESYKLEHVKGSVPNGKSEAKAVNPYSSEGEHIREIPEGTLSKRISEVGDLAHNKYKIELTVSGKTIVKPVDKQKPLDVVFVLDNSNSMNNDGPNFQRHNKAKKAAEALGTAVKDILGANSDNRVALVTYGSDIFDGRSVDVVKGFKEDDKYYGLQTKFTIQTENYSHKQLTNNAEEIIKRIPTEAPKAKWGSTTNGLTPEQQKEYYLSKVGETFTMKAFMEADDILSQVNRNSQKIIVHVTDGVPTRSYAINNFKLGASYESQFEQMKKNGYLNKSNFLLTDKPEDIKGNGESYFLFPLDSYQTQIISGNLQKLHYLDLNLNYPKGTIYRNGPVKEHGTPTKLYINSLKQKNYDIFNFGIDISGFRQVYNEEYKKNQDGTFQKLKEEAFKLSDGEITELMRSFSSKPEYYTPIVTSADTSNNEILSKIQQQFETILTKENSIVNGTIEDPMGDKINLQLGNGQTLQPSDYTLQGNDGSVMKDGIATGGPNNDGGILKGVKLEYIGNKLYVRGLNLGEGQKVTLTYDVKLDDSFISNKFYDTNGRTTLNPKSEDPNTLRDFPIPKIRDVREYPTITIKNEKKLGEIEFIKVDKDNNKLLLKGATFELQEFNEDYKLYLPIKNNNSKVVTGENGKISYKDLKDGKYQLIEAVSPEDYQKITNKPILTFEVVKGSIKNIIAVNKQISEYHEEGDKHLITNTHIPPKGIIPMTGGKGILSFILIGGAMMSIAGGIYIWKRYKKSSDMSIKKD

SEQ ID NO: 17 - protein, 869 aa, Streptococcus agalactiae
MRKYQKFSKILTLSLFCLSQIPLNTNVLGESTVPENGAKGKLVVKKTDDQNKPLSKATFVLKTTAHPESKIEKVTAELTGEATFDNLIPGDYTLSEETAPEGYKKTNQTWQVKVESNGKTTIQNSGDKNSTIGQNQEELDKQYPPTGIYEDTKESYKLEHVKGSVPNGKSEAKAVNPYSSEGEHIREIPEGTLSKRISEVGDLAHNKYKIELTVSGKTIVKPVDKQKPLDVVFVLDNSNSMNNDGPNFQRHNKAKKAAEALGTAVKDILGANSDNRVALVTYGSDIFDGRSVDVVKGFKEDDKYYGLQTKFTIQTENYSHKQLTNNAEEIIKRIPTEAPKAKWGSTTNGLTPEQQKEYYLSKVGETFTMKAFMEADDILSQVNRNSQKIIVHVTDGVPTRSYAINNFKLGASYESQFEQMKKNGYLNKSNFLLTDKPEDIKGNGESYFLFPLDSYQTQIISGNLQKLHYLDLNLNYPKGTIYRNGPVKEHGTPTKLYINSLKQKNYDIFNFGIDISGFRQVYNEEYKKNQDGTFQKLKEEAFKLSDGEITELMRSFSSKPEYYTPIVTSADTSNNEILSKIQQQFETILTKENSIVNGTIEDPMGDKINLQLGNGQTLQPSDYTLQGNDGSVMKDGIATGGPNNDGGILKGVKLEYIGNKLYVRGLNLGEGQKVTLTYDVKLDDSFISNKFYDTNGRTTLNPKSEDPNTLRDFPIPKIRDVREYPTITIKNEKKLGEIEFIKVDKDNNKLLLKGATFELQEFNEDYKLYLPIKNNNSKVVTGENGKISYKDLKDGKYQLIEAVSPEDYQKITNKPILTFEVVKGSIKNIIAVNKQISEYHEEGDKHLITNTHIPPKGIIPMTGGKGILS

SEQ ID NO: 18 - protein, 5 aa, Artificial
  cell wall anchor motif
IPMTG

SEQ ID NO: 19 - protein, 858 aa, Streptococcus agalactiae
MRKYQKFSKILTLSLFCLSQIPLNTNVLGESTVPENGAKGKLVVKKTDDQNKPLSKATFVLKTTAHPESKIEKVTAELTGEATFDNLIPGDYTLSEETAPEGYKKTNQTWQVKVESNGKTTIQNSGDKNSTIGQNQEELDKQYPPTGIYEDTKESYKLEHVKGSVPNGKSEAKAVNPYSSEGEHIREIPEGTLSKRISEVGDLAHNKYKIELTVSGKTIVKPVDKQKPLDVVFVLDNSNSMNNDGPNFQRHNKAKKAAEALGTAVKDILGANSDNRVALVTYGSDIFDGRSVDVVKGFKEDDKYYGLQTKFTIQTENYSHKQLTNNAEEIIKRIPTEAPKAKWGSTTNGLTPEQQKEYYLSKVGETFTMKAFMEADDILSQVNRNSQKIIVHVTDGVPTRSYAINNFKLGASYESQFEQMKKNGYLNKSNFLLTDKPEDIKGNGESYFLFPLDSYQTQIISGNLQKLHYLDLNLNYPKGTIYRNGPVKEHGTPTKLYINSLKQKNYDIFNFGIDISGFRQVYNEEYKKNQDGTFQKLKEEAFKLSDGEITELMRSFSSKPEYYTPIVTSADTSNNEILSKIQQQFETILTKENSIVNGTIEDPMGDKINLQLGNGQTLQPSDYTLQGNDGSVMKDGIATGGPNNDGGILKGVKLEYIGNKLYVRGLNLGEGQKVTLTYDVKLDDSFISNKFYDTNGRTTLNPKSEDPNTLRDFPIPKIRDVREYPTITIKNEKKLGEIEFIKVDKDNNKLLLKGATFELQEFNEDYKLYLPIKNNNSKVVTGENGKISYKDLKDGKYQLIEAVSPEDYQKITNKPILTFEVVKGSIKNIIAVNKQISEYHEEGDKHLITNTHIPPKGI

SEQ ID NO: 20 - DNA, 921 bp, Streptococcus agalactiae
atgaaacaaacattaaaacttatgttttcttttctgttgatgttagggactatgtttggaattagccaaactgttttagcgcaagaaactcatcagttgacgattgttcatcttgaagcaagggatattgatcgtccaaatccacagttggagattgcccctaaagaagggactccaattgaaggagtactctatcagttgtaccaattaaaatcaactgaagatggcgatttgttggcacattggaattccctaactatcacagaattgaaaaaacaggcgcagcaggtttttgaagccactactaatcaacaaggaaaggctacatttaaccaactaccagatggaatttattatggtctggcggttaaagccggtgaaaaaaatcgtaatgtctcagctttcttggttgacttgtctgaggataaagtgatttatcctaaaatcatctggtccacaggtgagttggacttgcttaaagttggtgtggatggtgataccaaaaaaccactagcaggcgttgtctttgaactttatgaaaagaatggtaggactcctattcgtgtgaaaaatggggtgcattctcaagatattgacgctgcaaaacatttagaaacagattcatcagggcatatcagaatttccgggctcatccatggggactatgtcttaaaagaaatcgagacacagtcaggatatcagatcggacaggcagagactgctgtgactattgaaaaatcaaaaacagtaacagtaacgattgaaaataaaaaagttccgacacctaaagtgccatctcgaggaggtcttattcccaaaacaggtgagcaacaggcaatggcacttgtaattattggtggtattttaattgctttagccttacgattactatcaaaacatcggaaacatcaaaataaggat

SEQ ID NO: 21 - protein, 307 aa, Streptococcus agalactiae
MKQTLKLMFSFLLMLGTMFGISQTVLAQETHQLTIVHLEARDIDRPNPQLEIAPKEGTPIEGVLYQLYQLKSTEDGDLLAHWNSLTITELKKQAQQVFEATTNQQGKATFNQLPDGIYYGLAVKAGEKNRNVSAFLVDLSEDKVIYPKIIWSTGELDLLKVGVDGDTKKPLAGVVFELYEKNGRTPIRVKNGVHSQDIDAAKHLETDSSGHIRISGLIHGDYVLKEIETQSGYQIGQAETAVTIEKSKTVTVTIENKKVPTPKVPSRGGLIPKTGEQQAMALVIIGGILIALALRLLSKHRKHQNKD

SEQ ID NO: 22 - DNA, 918 bp, Streptococcus agalactiae
atgggacaaaaatcaaaaatatctctagctacgaatattcgtatatggatttttcgtttaattttcttagcgggtttccttgttttggcatttcccatcgttagtcaggtcatgtactttcaagcctctcacgccaatattaatgcttttaaagaagctgttaccaagattgaccgggtggagattaatcggcgtttagaacttgcttatgcttataacgccagtatagcaggtgccaaaactaatggcgaatatccagcgcttaaagacccctactctgctgaacaaaagcaggcaggggtcgttgagtacgcccgcatgcttgaagtcaaagaacaaataggtcatgtgattattccaagaattaatcaggatatccctatttacgctggctctgctgaagaaaatcttcagaggggcgttggacatttagaggggaccagtcttccagtcggtggtgagtcaactcatgccgttctaactgcccatcgagggctaccaacggccaagctatttaccaatttagacaaggtaacagtaggtgaccgtttttacattgaacacatcggcggaaagattgcttatcaggtagaccaaatcaaagttatcgcccctgatcagttagaggatttgtacgtgattcaaggagaagatcacgtcaccctattaacttgcacaccttatatgataaatagtcatcgcctcctcgttcgaggcaagcgaattccttatgtggaaaaaacagtgcagaaagattcaaagaccttcaggcaacaacaatacctaacctatgctatgtgggtagtcgttggacttatcttgctgtcgcttctcatttggtttaaaaagacgaaacagaaaaagcggagaaagaatgaaaaagcggctagtcaaaatagtcacaataattcgaaataa

SEQ ID NO: 23 - protein, 305 aa, Streptococcus agalactiae
MGQKSKISLATNIRIWIFRLIFLAGFLVLAFPIVSQVMYFQASHANINAFKEAVTKIDRVEINRRLELAYAYNASIAGAKTNGEYPALKDPYSAEQKQAGVVEYARMLEVKEQIGHVIIPRINQDIPIYAGSAEENLQRGVGHLEGTSLPVGGESTHAVLTAHRGLPTAKLFTNLDKVTVGDRFYIEHIGGKIAYQVDQIKVIAPDQLEDLYVIQGEDHVTLLTCTPYMINSHRLLVRGKRIPYVEKTVQKDSKTFRQQQYLTYAMWVVVGLILLSLLIWFKKTKQKKRRKNEKAASQNSHNNSK

SEQ ID NO: 24 - DNA, 783 bp, Streptococcus agalactiae
atgggaagtctgattctcttatttccgattgtgagccaggtaagttactaccttgcttcgcatcaaaatattaatcaatttaagcgggaagtcgctaagattgatactaatacggttgaacgacgcatcgctttagctaatgcttacaatgagacgttatcaaggaatcccttgcttatagacccttttaccagtaagcaaaaagaaggtttgagagagtatgctcgtatgcttgaagttcatgagcaaataggtcatgtggcaatcccaagtattggggttgatattccaatttatgctggaacatccgaaactgtgcttcagaaaggtagtgggcatttggagggaaccagtcttccagtgggaggtttgtcaacccattcagtactaactgcccaccgtggcttgccaacagctaggctatttaccgacttaaataaagttaaaaaaggccagattttctatgtgacgaacatcaaggaaacacttgcctacaaagtcgtgtctatcaaagttgtggatccaacagctttaagtgaggttaagattgtcaatggtaaggattatataaccttgctgacttgcacaccttacatgatcaatagtcatcgtctcttggtaaaaggagagcgtattccttatgattctaccgaggcggaaaagcacaaagaacaaaccgtacaagattatcgtttgtcactagtgttgaagatactactagtattattaattggactcttcatcgtgataatgatgagaagatggatgcaacatcgtcaataa

SEQ ID NO: 25 - protein, 260 aa, Streptococcus agalactiae
MGSLILLFPIVSQVSYYLASHQNINQFKREVAKIDTNTVERRIALANAYNETLSRNPLLIDPFTSKQKEGLREYARMLEVHEQIGHVAIPSIGVDIPIYAGTSETVLQKGSGHLEGTSLPVGGLSTHSVLTAHRGLPTARLFTDLNKVKKGQIFYVTNIKETLAYKVVSIKVVDPTALSEVKIVNGKDYITLLTCTPYMINSHRLLVKGERIPYDSTEAEKHKEQTVQDYRLSLVLKILLVLLIGLFIVIMMRRWMQHRQ

SEQ ID NO: 26 - DNA, 924 bp, Streptococcus agalactiae
atgaaaaagattagaaaaagtttaggacttctactatgttgctttttaggattggtacaattagcgtttttttcggtagccagtgtaaatgctgatacccctaatcaactaacaatcacacagataggacttcagccaaatactacagaggaggggatttcttatcgtttatggactgtgactgacaacttaaaagttgatttattgagccaaatgacagatagcgaattgaaccagaagtataagagtatcttgacttctcctactgatactaatggtcagacaaagatagcactcccaaatggttcgtactttggtcgtgcttataaagctgatcaaagcgtttcaacaatagtacctttttatattgaattaccagatgataagttatcaaatcaattacagataaatcctaagcgaaaagttgaaacaggccgattaaaacttattaaatatacaaaagaaggaaagataaagaaaaggctatccggagtaatatttgtattatacgataaccagaatcagccagttcgctttaaaaatggacgatttacgaccgatcaagatgggattacttcattagtaactgatgataagggagaaattgaggttgaaggtttattacctggtaagtatatttttcgagaagcaaaagcactaactggttaccgtatatctatgaaggatgctgtagttgctgtagttgctaataaaacacaggaagtagaggtagaaaacgaaaaagaaactcctccaccaacaaatcctaaaccatcacaaccgctttttccacaatcatttcttcctaaaacaggaatgattattggtggaggactgacaattcttggttgtattattttgggaattttgtttatctttttaagaaaaactaaaaatagcaaatctgaaagaaacgatacagta

SEQ ID NO: 27 - protein, 308 aa, Streptococcus agalactiae
MKKIRKSLGLLLCCFLGLVQLAFFSVASVNADTPNQLTITQIGLQPNTTEEGISYRLWTVTDNLKVDLLSQMTDSELNQKYKSILTSPTDTNGQTKIALPNGSYFGRAYKADQSVSTIVPFYIELPDDKLSNQLQINPKRKVETGRLKLIKYTKEGKIKKRLSGVIFVLYDNQNQPVRFKNGRFTTDQDGITSLVTDDKGEIEVEGLLPGKYIFREAKALTGYRISMKDAVVAVVANKTQEVEVENEKETPPPTNPKPSQPLFPQSFLPKTGMIIGGGLTILGCIILGILFIFLRKTKNSKSERNDTV

SEQ ID NO: 28 - DNA, 885 bp, Streptococcus agalactiae
atgggaggaaaatttcagaaaaaccttaagaaatcggtcgttttaaatcgatggatgaatgtaggcttgatactattgttcttagttggtcttttgataacctcatatccttttatttcaaattggtactataatattaaagctaataatcaagtaactaactttgataatcaaacccaaaaattaaatactaaagagattaatagacgatttgagttagcaaaagcttataatagaacactggacccaagccgcctatcagatccctatactgaaaaagaaaaaaaaggtattgctgaatacgcccacatgcttgagattgctgaaatgattggatatattgatataccgtctatcaagcaaaaattacctatctatgcggggactaccagtagtgttcttgaaaaaggagcaggacaccttgaaggaacctccttgccaattggtggaaaaagttcacatactgttatcacagctcatcgcggcttacctaaagctaagttatttacagatttagataaacttaaaaaaggaaaaattttttatattcataatatcaaagaagttttagcctataaggttgatcaaataagtgttgtaaagccagataatttttctaaattattggttgttaaaggtaaggattatgcgactttgctaacatgtacaccttattcgattaattcacatcgtttactagttagagggcatcgaatcaagtatgtacctcctgttaaagaaaagaactatttaatgaaagaattgcaaacacactataaactttatttcctcttatcaatcctagttattcttatattagtcgctttactattatatttaaaacgaaaatttaaagagagaaagagaaagggaaatcaaaaatga

SEQ ID NO: 29 - protein, 294 aa, Streptococcus agalactiae
MGGKFQKNLKKSVVLNRWMNVGLILLFLVGLLITSYPFISNWYYNIKANNQVTNFDNQTQKLNTKEINRRFELAKAYNRTLDPSRLSDPYTEKEKKGIAEYAHMLEIAEMIGYIDIPSIKQKLPIYAGTTSSVLEKGAGHLEGTSLPIGGKSSHTVITAHRGLPKAKLFTDLDKLKKGKIFYIHNIKEVLAYKVDQISVVKPDNFSKLLVVKGKDYATLLTCTPYSINSHRLLVRGHRIKYVPPVKEKNYLMKELQTHYKLYFLLSILVILILVALLLYLKRKFKERKRKGNQK

SEQ ID NO: 30 - DNA, 882 bp, Streptococcus agalactiae
gtgaagactaaaaaaatcatcaaaaaaacaaaaaaaaagaagaagtcaaatcttccttttatcattctttttctaataggtctatctattttattgtatccagtggtatcacgtttttactatacgatagaatctaataatcaaacacaggattttgagagagctgctaaaaaacttagtcagaaagaaatcaatcgacgtatggctctagcacaagcttataatgattctttaaataatgtccatcttgaagatccttatgagaaaaaacgaattcaaaagggggtagcagagtacgcccgtatgttagaggtaagtgaaaaaatcggaacaatttcagttcctaagataggtcaaaaactccctatatttgcaggttcaagtcaagaagttctatctaaaggagcagggcatttagaaggtacctctcttccaattgggggcaatagtacacatactgttataacagcgcattcaggaattccagataaagaactcttttctaaccttaaaaagttaaaaaaaggagataagttttatattcaaaacataaaagaaacgatagcatatcaagtagatcagataaaagtcgttacacccgataacttttcagatttgttggttgttcctggacatgattatgcaaccttattgacttgcaccccgattatgatcaatacacacagacttttagtaaggggacatcgtatcccttataaaggtcctattgatgaaaaattaataaaagacggtcatttaaacacgatttatagatatctattctatatatctttagttattattgcttggttactttggttaataaaacgtcaacgtcaaaaaaatcgtttagcaagtgttagaaaaggaattgaatcataa

SEQ ID NO: 31 - protein, 293 aa, Streptococcus agalactiae
MKTKKIIKKTKKKKKSNLPFIILFLIGLSILLYPVVSRFYYTIESNNQTQDFERAAKKLSQKEINRRMALAQAYNDSLNNVHLEDPYEKKRIQKGVAEYARMLEVSEKIGTISVPKIGQKLPIFAGSSQEVLSKGAGHLEGTSLPIGGNSTHTVITAHSGIPDKELFSNLKKLKKGDKFYIQNIKETIAYQVDQIKVVTPDNFSDLLVVPGHDYATLLTCTPIMINTHRLLVRGHRIPYKGPIDEKLIKDGHLNTIYRYLFYISLVIIAWLLWLIKRQRQKNRLASVRKGIES

SEQ ID NO: 32 - protein, 199 aa, Streptococcus agalactiae
MIRRYSANFLAILGIILVSSGIYWGWYNINQAHQADLTSQHIVKVLDKSITHQVKGSENGELPVKKLDKTDYLGTLDIPNLKLHLPVAANYSFEQLSKTPTRYYGSYLTNNMVICAHNFPYHFDALKNVDMGTDVYFTTTTGQIYHYKISNREIIEPTAIEKVYKTATSDNDWDLSLFTCTKAGVARVLVRCQLIDVKN

SEQ ID NO: 33 - protein, 223 aa, Streptococcus agalactiae
MIYKKILKITLLLLFSLSTQLVSADTNDQMKTGSITIQNKYNNQGIAGGNLLVYQVAQAKDVDGNQVFTLTTPFQGIGIKDDDLTQVNLDSNQAKYVNLLTKAVHKTQPLQTFDNLPAEGIVANNLPQGIYLFIQTKTAQGYELMSPFILSIPKDGKYDITAFEKMSPLNAKPKKEETITPTVTHQTKGKLPFTGQVWWPIPILIMSGLLCLIIALKWRRRRD

SEQ ID NO: 34 - protein, 268 aa, Streptococcus agalactiae
MAYPSLANYWNSFHQSRAIMDYQDRVTHMDENDYKKIINRAKEYNKQFKTSGMKWHMTSQERLDYNSQLAIDKTGNMGYISIPKINIKLPLYHGTSEKVLQTSIGHLEGSSLPIGGDSTHSILSGHRGLPSSRLFSDLDKLKVGDHWTVSILNETYTYQVDQIRTVKPDDLRDLQIVKGKDYQTLVTCTPYGVNTHRLLVRGHRVPNDNGNALVVAEAIQIEPIYIAPFIAIFLTLILLLISLEVTRRARQRKKILKQAMRKEENNDL

SEQ ID NO: 35 - protein, 502 aa, Streptococcus agalactiae
MKKKMIQSLLVASLAFGMAVSPVTPIAFAAETGTITVQDTQKGATYKAYKVFDAEIDNANVSDSNKDGASYLIPQGKEAEYKASTDFNSLFTTTTNGGRTYVTKKDTASANEIATWAKSISANTTPVSTVTESNNDGTEVINVSQYGYYYVSSTVNNGAVIMVTSVTPNATIHEKNTDATWGDGGGKTVDQKTYSVGDTVKYTITYKNAVNYHGTEKVYQYVIKDTMPSASVVDLNEGSYEVTITDGSGNITTLTQGSEKATGKYNLLEENNNFTITIPWAATNTPTGNTQNGANDDFFYKGINTITVTYTGVLKSGAKPGSADLPENTNIATINPNTSNDDPGQKVTVRDGQITIKKIDGSTKASLQGAIFVLKNATGQFLNFNDTNNVEWGTEANATEYTTGADGIITITGLKEGTYYLVEKKAPLGYNLLDNSQKVILGDGATDTTNSDNLLVNPTVENNKGTELPSTGGIGTTIFYIIGAILVIGAGIVLVARRRLRS

SEQ ID NO: 36 - protein, 1434 aa, Streptococcus agalactiae
MLKKCQTFIIESLKKKKHPKEWKIIMWSLMILTTFLTTYFLILPAITVEETKTDDVGITLENKNSSQVTSSTSSSQSSVEQSKPQTPASSVTETSSSEEAAYREEPLMFRGADYTVTVTLTKEAKIPKNADLKVTELKDNSATFKDYKKKALTEVAKQDSEIKNFKLYDITIESNGKEAEPQAPVKVEVNYDKPLEASDENLKVVHFKDDGQTEVLKSKDTAETKNTSSDVAFKTDSFSIYAIVQEDNTEVPRLTYHFQNNDGTDYDFLTASGMQVHHQIIKDGESLGEVGIPTIKAGEHFNGWYTYDPTTGKYGDPVKFGEPITVTETKEICVRPFMSKVATVTLYDDSAGKSILERYQVPLDSSGNGTADLSSFKVSPPTSTLLFVGWSKTQNGAPLSESEIQALPVSSDISLYPVFKESYGVEFNTGDLSTGVTYIAPRRVLTGQPASTIKPNDPTRPGYTFAGWYTAASGGAAFDFNQVLTKDTTLYAHWSPAQTTYTINYWQQSATDNKNATDAQKTYEYAGQVTRSGLSLSNQTLTQQDINDKLPTGFKVNNTRTETSVMIKDDGSSVVNVYYDRKLITIKFAKYGGYSLPEYYYSYNWSSDADTYTGLYGTTLAANGYQWKTGAWGYLANVGNNQVGTYGMSYLGEFILPNDTVDSDVIKLFPKGNIVQTYRFFKQGLDGTYSLADTGGGAGADEFTFTEKYLGFNVKYYQRLYPDNYLFDQYASQTSAGVKVPISDEYYDRYGAYHKDYLNLVVWYERNSYKIKYLDPLDNTELPNFPVKDVLYEQNLSSYAPDTTTVQPKPSRPGYVWDGKWYKDQAQTQVFDFNTTMPPHDVKVYAGWQKVTYRVNIDPNGGRLSKTDDTYLDLHYGDRIPDYTDITRDYIQDPSGTYYYKYDSRDKDPDSTKDAYYTTDTSLSNVDTTTKYKYVKDAYKLVGWYYVNPDGSIRPYNFSGAVTQDINLRAIWRKAGDYHIIYSNDAVGTDGKPALDASGQQLQTSNEPTDPDSYDDGSHSALLRRPTMPDGYRFRGWWYNGKIYNPYDSIDIDAHLADANKNITIKPVIIPVGDIKLEDTSIKYNGNGGTRVENGNVVTQVETPRMELNSTTTIPENQYFTRTGYNLIGWHHDKDLADTGRVEFTAGQSIGIDNNPDATNTLYAVWQPKEYTVRVSKTVVGLDEDKTKDFLFNPSETLQQENFPLRDGQTKEFKVPYGTSISIDEQAYDEFKVSESITEKNLATGEADKTYDATGLQSLTVSGDVDISFTNTRIKQKVRLQKVNVENDNNFLAGAVFDIYESDANGNKASHPMYSGLVTNDKGLLLVDANNYLSLPVGKYYLTETKAPPGYLLPKNDISVLVISTGVTFEQNGNNATPIKENLVDGSTVYTFKITNSKGTELPSTGGIGTHIYILVGLALALPSGLILYYRKKI

SEQ ID NO: 37 - protein, 189 aa, Streptococcus agalactiae
MKRQISSDKLSQELDRVTYQKRFWSVIKNTIYILMAVASIAILIAVLWLPVLRIYGHSMNKTLSAGDVVFTVKGSNFKTGDVVAFYYNNKVLVKRVIAESGDWVNIDSQGDVYVNQHKLKEPYVIHKALGNSNIKYPYQVPDKKIFVLGDNRKTSIDSRSTSVGDVSEEQIVGKISFRIWPLGKISSIN

SEQ ID NO: 38 - DNA, 1376 bp, Streptococcus agalactiae
atgaataaaaaggtactattgacatcgacaatggcagcttcgctattatcagtcgcaagtgttcaagcacaagaaacagatacgacgtggacagcacgtactgtttcagaggtaaaggctgatttggtaaagcaagacaataaatcatcatatactgtgaaatatggtgatacactaagcgttatttcagaagcaatgtcaattgatatgaatgtcttagcaaaaataaataacattgcagatatcaatcttatttatcctgagacaacactgacagtaacttacgatcagaagagtcatactgccacttcaatgaaaatagaaacaccagcaacaaatgctgctggtcaaacaacagctactgtggatttgaaaaccaatcaagtttctgttgcagaccaaaaagtttctctcaatacaatttcggaaggtatgacaccagaagcagcaacaacgattgtttcgccaatgaagacatattcttctgcgccagctttgaaatcaaaagaagtattagcacaagagcaagctgttagtcaagcagcagctaatgaacaggtatcaccagctcctgtgaagtcgattacttcagaagttccagcagctaaagaggaagttaaaccaactcagacgtcagtcagtcagtcaacaacagtatcaccagcttctgttgccgctgaaacaccagctccagtagctaaagtagcaccggtaagaactgtagcagcccctagagtggcaagtgttaaagtagtcactcctaaagtagaaactggtgcatcaccagagcatgtatcagctccagcagttcctgtgactacgacttcaccagctacagacagtaagttacaagcgactgaagttaagagcgttccggtagcacaaaaagctccaacagcaacaccggtagcacaaccagcttcaacaacaaatgcagtagctgcacatcctgaaaatgcagggctccaacctcatgttgcagcttataaagaaaaagtagcgtcaacttatggagttaatgaattcagtacataccgtgcgggagatccaggtgatcatggtaaaggtttagcagttgactttattgtaggtactaatcaagcacttggtaataaagttgcacagtactctacacaaaatatggcagcaaataacatttcatatgttatctggcaacaaaagttttactcaaatacaaacagtatttatggacctgctaatacttggaatgcaatgccagatcgtggtggcgttactgccaaccactatgaccacgttcacgtatcatttaacaaataatataaaaaaggaagctatttggcttcttttttatatgccttgaatagactttcaaggttcttatataatttttatta

SEQ ID NO: 39 - protein, 432 aa, Streptococcus agalactiae
MNKKVLLTSTMAASLLSVASVQAQETDTTWTARTVSEVKADLVKQDNKSSYTVKYGDTLSVISEAMSIDMNVLAKINNIADINLIYPETTLTVTYDQKSHTATSMKIETPATNAAGQTTATVDLKTNQVSVADQKVSLNTISEGMTPEAATTIVSPMKTYSSAPALKSKEVLAQEQAVSQAAANEQVSPAPVKSITSEVPAAKEEVKPTQTSVSQSTTVSPASVAAETPAPVAKVAPVRTVAAPRVASVKVVTPKVETGASPEHVSAPAVPVTTTSPATDSKLQATEVKSVPVAQKAPTATPVAQPASTTNAVAAHPENAGLQPHVAAYKEKVASTYGVNEFSTYRAGDPGDHGKGLAVDFIVGTNQALGNKVAQYSTQNMAANNISYVIWQQKFYSNTNSIYGPANTWNAMPDRGGVTANHYDHVHVSFNK

SEQ ID NO: 40 - protein, 392 aa, Streptococcus agalactiae
DLVKQDNKSSYTVKYGDTLSVISEAMSIDMNVLAKINNIADINLIYPETTLTVTYDQKSHTATSMKIETPATNAAGQTTATVDLKTNQVSVADQKVSLNTISEGMTPEAATTIVSPMKTYSSAPALKSKEVLAQEQAVSQAAANEQVSPAPVKSITSEVPAAKEEVKPTQTSVSQSTTVSPASVAAETPAPVAKVAPVRTVAAPRVASVKVVTPKVETGASPEHVSAPAVPVTTTSPATDSKLQATEVKSVPVAQKAPTATPVAQPASTTNAVAAHPENAGLQPHVAAYKEKVASTYGVNEFSTYRAGDPGDHGKGLAVDFIVGTNQALGNKVAQYSTQNMAANNISYVIWQQKFYSNTNSIYGPANTWNAMPDRGGVTANHYDHVHVSFNK

SEQ ID NO: 41 - protein, 429 aa, Streptococcus agalactiae
MIEKYLESSIESKCQLVVLFFKTSYLPITEVAEKTGLTFLQLNHYCEELNAFFPDSLSMTIQKRMISCQFTHPFKETYLYQLYASSNVLQLLAFLIKNGSHSRPLTDFARSHFLSNSSAYRMREALIPLLRNFELKLSKNKIVGEEYRIRYLIALLYSKFGIKVYDLTQQDKNTIHSFLSHSSTHLKTSPWLSESFSFYDILLALSWKRHQFSVTIPQTRIFQQLKKLFIYDSLKKSSRDIIETYCQLNFSAGDLDYLYLIYITANNSFASLQWTPEHIRQCCQLFEENDTFRLLLKPIITLLPNLKEQKPSLVKALMFFSKSFLFNLQHFIPETNLFVSPYYKGNQKLYTSLKLIVEEWLAKLPGKRYLNHKHFHLFCHYVEQILRNIQPPLVVVFVASNFINAHLLTDSFPRYFSDKSIDFHSYIAR

SEQ ID NO: 42 - protein, 627 aa, Streptococcus agalactiae
MVSSYMFVRGEKMNNKIFLNKEASFLAHTKRKRRFAVTLVGVFFMLLACAGAIGFGQVAYAADEKTVPSHSSPNPEFPWYGYDAYGKEYPGYNIWTRYHDLRVNLNGSRSYQVYCFNIQSNYPSQKNSFIKNWFKKIEGNGKSFVDYAHTTKLGKEELEQRLLSLLYNAYPNDANGYMKGLEHLNAITVTQYAVWHYSDNSQYQFETLWESEAKEGKISRSQVTLMREALKKLIDPNLEATAVNKIPSGYRLNIFESENEAYQNLLSAEYVPDDPPKPGETSEHNPKTPELDGTPIPEDPKHPDDNLEPTLPPVMLDGEEVPEVPSESLEPALPPLMPELDGQEVPEKPSIDLPIEVPRYEFNNKDQSPLAGESGETEYITEVYGNQQNPVDIDKKLPNETGFSGNMVETEDTKEPEVLMGGQSESVEFTKDTQTGMSGQTTPQVETEDTKEPEVLMGGQSESVEFTKDTQTGMSGQTTPQIETEDTKEPEVLMGGQSESVEFTKDTQTGMSGQTTPQIETEDTKEPEVLMGGQSESVEFTKDTQTGMSGFSETATVVEDTRPKLVFHFDNNEPKVEENREKPTKNITPILPATGDIENVLAFLGILILSVLSIFSLLKNKQSNKKV

SEQ ID NO: 43 - protein, 67 aa, Streptococcus agalactiae
MSLRHQNKKGIRKEGWKSRPQSRWSDHCQLVAQKSVLKQAISKTVLAERGLFSCLDDYLERHALKVN

SEQ ID NO: 44 - protein, 1036 aa, Streptococcus agalactiae
MYSRLKRELVIVINRKKKYKLIRLMVTVGLIFSQLVLPIRRLGLQMISTQTKVIPQEIVTQTETQGTQVVATKQKLESENSSLKVALKRESGFEHNATIDASLDTESQGDNSQRSVTQAIVTMALELRKQGLSIVDTKIVRIQSSTNQRNDITTTLTFKNGLSLEGASTEANDPNVRVGIVNPNDTVQTITPTIKQDADGKVKNLVFTGRLGKQVIIVSTTRLKEEQTISLDSYGELVIDGAVGLSQKDRPPYSKPITVNILKPKLSSIESSLDSKDFEIVKTIDNLYTWDDQFYLLDFISKQYEVLKTDYQSAKDSTPQTRDILFGEYTVEPLVMNKGHNNTINIYIRSTRPLGLKPIGAAPALIQPRSFRSLTPRSTRMKRSAPVEKFEGELEHHKRIDYLGDNQNNPDTTIDDKEDEHDTSDLYRLYLDMTGKKNPLDILVVVDKSGSMQEGIGSVQRYRYYAQRWDDYYSQWVYHGTFDYSSYQGESFNRGQIHYRYRGIVSVSDGIRRDDAVKNSLLGVNGLLQRFVNINPENKLSVIGFQGSADYHAGKWYPDQSPRGGFYQPNLNNSRDAELLKGWSTNSLLDPNTLTALHNNGTNYHAALLKAKEILNEVKDDGRRKIMIFISDGVPTFYFGEDGYRSGNGSSNDRNNVTRSQEGSKLAIDEFKARYPNLSIYSLGVSKDINSDTASSSPVVLKYLSGEEHYYGITDTAELEKTLNKIVEDSKLSQLGISDSLSQYVDYYDKQPDVLVTRKSKVNDETEILYQKDQVQEAGKDIIDKVVFTPKTTSQPKGKVTLTFKSDYKVDDEYTYTLSFNVKASDEAYEKYKDNEGRYSEMGDSDTDYGTNQTSSGKGGLPSNSDASVNYMADGREQKLPYKHPVIQVKTVPITFTKVDADNNQKKLAGVEFELRKEDKKIVWEKGTTGSNGQLNFKYLQKGKTYYLYETKAKLGYTLPENPWEVAVANNGDIKVKHPIEGELKSKDGSYMIKNYKIYQLPSSGGRGSQIFIIVGSMTATVALLFYRRQHRKKQY

SEQ ID NO: 45 - protein, 556 aa, Streptococcus agalactiae
MTNRRETVREKILITAKKLMLACLAILAVVGLGMTRVSALSKDDTAQLKITNIEGGPTVTLYKIGEGVYNTNGDSFINFKYAEGVSLTETGPTSQEITTIANGINTGKIKPFSTENVSISNGTATYNARGASVYIALLTGATDGRTYNPILLAASYNGEGNLVTKNIDSKSNYLYGQTSVAKSSLPSITKKVTGTIDDVNKKTTSLGSVLSYSLTFELPSYTKEAVNKTVYVSDNMSEGLTFNFNSLTVEWKGKMANITEDGSVMVENTKIGIAKEVNNGFNLSFIYDSLESISPNISYKAVVNNKAIVGEEGNPNKAEFFYSNNPTKGNTYDNLDKKPDKGNGITSKEDSKIVYTYQIAFRKVDSVSKTPLIGAIFGVYDTSNKLIDIVTTNKNGYAISTQVSSGKYKIKELKAPKGYSLNTETYEITANWVTATVKTSANSKSTTYTSDKNKATDNSEQVGWLKNGIFYSIDSRPTGNDVKEAYIESTKALTDGTTFSKSNEGSGTVLLETDIPNTKLGELPSTGSIGTYLFKAIGSAAMIGAIGIYIVKRRKA

SEQ ID NO: 46 - protein, 280 aa, Streptococcus agalactiae
MTERLKNLGILLLFLLGTAIFLYPTLSSQWNAYRDRQLLSTYHKQVIQKKPSEMEEVWQKAKAYNARLGIQPVPDAFSFRDGIHDKNYESLLQIENNDIMGYVEVPSIKVTLPIYHYTTDEVLTKGAGHLFGSALPVGGDGTHTVISAHRGLPSAEMFTNLNLVKKGDTFYFRVLNKVLAYKVDQILIVEPDQATSLSGVMGKDYATLVTCTPYGVNTKRLLVRGHRIAYHYKKYQQAKKAMKLVDKSRMWAEVVCAAFGVVIAIILVFMYSRVSAKKSK

SEQ ID NO: 47 - protein, 497 aa, Streptococcus agalactiae
MIEKYLESSIESKCQLIVLFFKTSYLPITEVAEKTGLTFLQLNHYCEELNAFFPGSLSMTIQKRMISCQFTHPFKETYLYQLYASSNVLQLLAFLIKNGSHSRPLTDFARSHFLSNSSAYRMREALIPLLRNFELKLSKNKIVGEEYRIRYLIALLYSKFGIKVYDLTQQDKNTIHSFLSHSSTHLKTSPWLSESFSFYDILLALSWKRHQFSVTIPQTRIFQQLKKLFVYDSLKKSSHDIIETYCQLNFSAGDLDYLYLIYITANNSFASLQWTPEHIRQYCQLFEENDTFRLLLNPIITLLPNLKEQKASLVKALMFFSKSFLFNLQHFIPETNLFVSPYYKGNQKLYTSLKLIVEEWMAKLPGKRDLNHKHFHLFCHYVEQSLRNIQPPLVVVFVASNFINAHLLTDSFPRYFSDKSIDFHSYYLLQDNVYQIPDLKPDLVITHSQLIPFVHHELTKGIAVAEISFDESILSIQELMYQVKEEKFQADLTKQLT

SEQ ID NO: 48 - protein, 762 aa, Streptococcus agalactiae
LRGEKMKKTRFPNKLNTLNTQRVLSKNSKRFTVTLVGVFLMIFALVTSMVGAKTVFGLVESSTPNAINPDSSSEYRWYGYESYVRGHPYYKQFRVAHDLRVNLEGSRSYQVYCFNLKKAFPLGSDSSVKKWYKKHDGISTKFEDYAMSPRITGDELNQKLRAVMYNGHPQNANGIMEGLEPLNAIRVTQEAVWYYSDNAPISNPDESFKRESESNLVSTSQLSLMRQALKQLIDPNLATKMPKQVPDDFQLSIFESEDKGDKYNKGYQNLLSGGLVPTKPPTPGDPPMPPNQPQTTSVLIRKYAIGDYSKLLEGATLQLTGDNVNSFQARVFSSNDIGERIELSDGTYTLTELNSPAGYSIAEPITFKVEAGKVYTIIDGKQIENPNKEIVEPYSVEAYNDFEEFSVLTTQNYAKFYYAKNKNGSSQVVYCFNADLKSPPDSEDGGKTMTPDFTTGEVKYTHIAGRDLFKYTVKPRDTDPDTFLKHIKKVIEKGYREKGQAIEYSGLTETQLRAATQLAIYYFTDSAELDKDKLKDYHGFGDMNDSTLAVAKILVEYAQDSNPPQLTDLDFFIPNNNKYQSLIGTQWHPEDLVDIIRMEDKKEVIPVTHNLTLRKTVTGLAGDRTKDFHFEIELKNNKQELLSQTVKTDKTNLEFKDGKATINLKHGESLTLQGLPEGYSYLVKETDSEGYKVKVNSQEVANATVSKTGITSDETLAFENNKEPVVPTGVDQKINGYLALIVIAGISLGIWGIHTIRIRKHD

SEQ ID NO: 49 - protein, 131 aa, Streptococcus agalactiae
MIIKRNDMAPSVKAGDAILFYRLSQTYKVEEAVVYEDSKTSITKVGRIIAQAGDEVDLTEQGELKINGHIQNEGLTFIKSREANYPYRIADNSYLILNDYYSQESENYLQDAIAKDAIKGTINTLIRLRNH

SEQ ID NO: 50 - protein, 340 aa, Streptococcus agalactiae
MKLRHLLLTGAALTSFAATTVHGETVVNGAKLTVTKNLDLVNSNALIPNTDFTFKIEPDTTVNEDGNKFKGVALNTPMTKVTYTNSDKGGSNTKTAEFDFSEVTFEKPGVYYYKVTEEKIDKVPGVSYDTTSYTVQVHVLWNEEQQKPVATYIVGYKEGSKVPIQFKNSLDSTTLTVKKKVSGTGGDRSKDFNFGLTLKANQYYKASEKVMIEKTTKGGQAPVQTEASIDQLYHFTLKDGESIKVTNLPVGVDYVVTEDDYKSEKYTTNVEVSPQDGAVKNIAGNSTEQETSTDKDMTITFTNKKDFEVPTGVAMTVAPYIALGIVAVGGALYFVKKKNA

SEQ ID NO: 51 - protein, 237 aa, Streptococcus agalactiae
MIVRLIKLLDKLINVIVLCFFFLCLLIAALGIYDALTVYQGANATNYQQYKKKGVQFDDLLAINSDVMAWLTVKGTHIDYPIVQGENNLEYINKSVEGEYSLSGSVFLDYRNKVTFEDKYSLIYAHHMAGNVMFGELPNFRKKSFFNKHKEFSIETKTKQKLKINIFACIQTDAFDSLLFNPIDVDISSKNEFLNHIKQKSVQYREILTTNESRFVALSTCEDMTTDGRIIVIGQIE

SEQ ID NO: 52 - protein, 215 aa, Streptococcus agalactiae
MKKSILRILAIGYLLMSFCLLDSVEAENLTASINIEVINQVDVATNKQSSDIDETFMFVIEALDKESPLPNSVTTSVKGNGKTSFEQLTFSEVGQYHYKIHQLLGKNSQYHYDETVYEVVIYVLYNEQSGALETNLVSNKLGETEKSELIFKQEYSEKTPEPHQPDTTEKEKPQKKRNGILPSTGEMVSYVSALGIVLVATITLYSIYKKLKTSK

SEQ ID NO: 53 - protein, 450 aa, Streptococcus agalactiae
MTRTNYQKKRMTCPVETEDITYRRKKIKGRRQAILAQFEPELVHHELIGDSCTCPDCHGTLTEIGSVVQRQELVFIPAQLKRINHVQHAYKCQTCSDNSLSDKIIKAPVPKAPLAHSLGSASIIAHTVHQKFTLKVPNYRQEEDWNKLGLSISRKEIANWHIKSSQYYFEPLYDLLRDILLSQEVIHADETSYRVLESDTQLTYYWTFLSGKHEKKGITLYHHDKRRSGLVTQEVLGDYSGYVHCDMHGAYRQLEHAKLVGCWAHVRRKFFEATPKQADKTSLGRKGLVYCDKLFALEAEWCELPPQERLVKRKEILTPLMTTFFDWCREQVVLSGSKLGLAIAYSLKHERTFRTVLEDGHIVLSNNMAERAIKSLVMGRKNWLFSQSFEGAKAAAIIMSLLETAKRHGLNSEKYISYLLDRLPNEETLAKREVLEAYLPWAKKVQTNCQ

SEQ ID NO: 54 - protein, 116 aa, Streptococcus agalactiae
MTIRLNDLGQVYLVCGKTDMRQGIDSLAYLVKSQHELDLFSGAVYLFCGGRRDRFKALYWDGQGFWLLYKRFENGKLAWPRNRDEVKCLTAVQVDWLMKGFFISPNIKISKSHDFY

SEQ ID NO: 55 - protein, 251 aa, Streptococcus agalactiae
MECYRDRQLLSTYHKQVTQKKPSEMEEVWQKAKAYNARLGIQPVPDAFSFRDGIHDKNYESLLQIENNDIMGYVEVPSIKVTLPIYHYTTDEVLTKGAGHLFGSALPVGGDGTHTVISAHRGLPSAEMFTNLNLVKKGDTFYFRVLNKVLAYKVDQILTVEPDQVTSLSGVMGKDYATLVTCTPYGVNTKRLLVRGHRIAYHYKKYQQAKKAMKLVDKSRMWAEVVCAAFGVVIAIILVFMYSRVSAKKSK

SEQ ID NO: 56 - protein, 511 aa, Streptococcus agalactiae
MPYVKKKKDSFLVETYLEQSIRDKSELVLLLFKSPTIIFSHVAKQTGLTAVQLKYYCKELDDFFGNNLDITIKKGKIICCFVKPVKEFYLHQLYDTSTILKLLVFFIKNGTSSQPLIKFSKKYFLSSSSAYRLRESLIKLLREFGLRVSKNTIVGEEYRIRYLIAMLYSKFGIVIYPLDHLDNQIIYRFLSQSATNLRTSPWLEEPFSFYNMLLALSWKRHQFAVSIPQTRIFRQLKKLFIYDCLTRSSRQVIENAFSLTFSQGDLEYLFLIYITTNNSFASLQWTPQHIETCCHIFEKNDTFRLLLEPILKRLPQLNHSKQDLIKALMYFSKSFLFNLQHFVIEIPSFSLPTYTGNSNLYKALKNIVNQWLAQLPGKRHLNEKHLQLFCSHIEQILKNKQPALTVVLISSNFINAKLLTDTIPRYFSDKGIHFYSFYLLRDDIYQIPSLKPDLVITHSRLIPFVKNDLVKGVTVAEFSFDNPDYSIASIQNLIYQLKDKKYQDFLNEQLQ

SEQ ID NO: 57 - protein, 744 aa, Streptococcus agalactiae
MQKRDKTNYGSANNKRRQTTIGLLKVFLTFVALIGIVGFSIRAFGAEEQSVPNKQSSVQDYPWYGYDSYSKGYPDYSPLKTYHNLKVNLDGSKEYQAYCFNLTKHFPSKSDSVRSQWYKKLEGTNENFIKLADKPRIEDGQLQQNILRILYNGYPNDRNGIMKGIDPLNAILVTQNAIWYYTDSSYISDTSKAFQQEETDLKLDSQQLQLMRNALKRLINPKEVESLPNQVPANYQLSIFQSSDKTFQNLLSAEYVPDTPPKPGEEPPAKTEKTSVIIRKYAEGDYSKLLEGATLKLAQIEGSGFQEKIFDSNKSGEKVELPNGTYVLSELKPPQGYGVATPITFKVAAEKVLIKNKEGQFVENQNKEIAEPYSVTAFNDFEEIGYLSDFNNYGKFYYAKNTNGTNQVVYCFNADLHSPPDSYDHGANIDPDVSESKEIKYTHVSGYDLYKYAATPRDKDADFFLKHIKKILDKGYKKKGDTYKTLTEAQFRAATQLAIYYYTDSADLTTLKTYNDNKGYHGFDKLDDATLAVVHELITYAEDVTLPMTQNLDFFVPNSSRYQALIGTQYHPNELIDVISMEDKQAPIIPITHKLTISKTVTGTIADKKKEFNFEIHLKSSDGQAISGTYPTNSGELTVTDGKATFTLKDGESLIVEGLPSGYSYEITETGASDYEVSVNGKNAPDGKATKASVKEDETVAFENRKDLVPPTGLTTDGAIYLWLLLLVPFGLLVWLFGRKGTKK

SEQ ID NO: 58 - protein, 173 aa, Streptococcus agalactiae
MTNYLNRLNENPLLKAFIRLVLKISIIGFLGYILFQYVFGVMIVNTNQMSPAVSAGDGVLYYRLTDRYHINDVVVYEVDDTLKVGRIAAQAGDEVNFTQEGGLLINGHPPEKEVPYLTYPHSSGPNFPYKVPTGTYFILNDYREERLDSRYYGALPINQIKGKISTLLRVRGI

SEQ ID NO: 59 - protein, 344 aa, Streptococcus agalactiae
MKKNKLLLATAILATALGTASLNQNVKAETAGVSENAKLIVKKTFDSYTDNEVLMPKADYTFKVEADSTASGKTKDGLEIKPGIVNGLTEQIISYTNTDKPDSKVKSTEFDFSKVVFPGIGVYRYTVSEKQGDVEGITYDTKKWTVDVYVGNKEGGGFEPKFIVSKEQGTDVKKPVNFNNSFATTSLKVKKNVSGNTGELQKEFDFTLTLNESTNFKKDQIVSLQKGNEKFEVKIGTPYKFKLKNGESIQLDKLPVGITYKVNEMEANKDGYKTTASLKEGDGQSKMYQLDMEQKTDESADEIVVTNKRDTQVPTGVVGTLAPFAVLSIVAIGGVIYITKRKKA

SEQ ID NO: 60 - protein, 239 aa, Streptococcus agalactiae
MTIVQVINKAIDTLILIFCLVVLFLAGFGLWDSYHLYQQADASNFKKFKTAQQQPKFEDLLALNEDVIGWLNIPGTHIDYPLVQGKTNLEYINKAVDGSVAMSGSLFLDTRNHNDFTDDYSLIYGHHMAGNAMFGEIPKFLKKDFFSKHNKAIIETKERKKLTVTIFACLKTDAFNQLVFNPNAITNQDQQRQLVDYISKRSKQFKPVKLKHHTKFVAFSTCENFSTDNRVIVVGTIQE

SEQ ID NO: 61 - protein, 183 aa, Streptococcus agalactiae
MILTMLAFNQTVLAKDSTVQTSISVENVLERAGDSTPFSIALESIDAMKTIEEITIAGSGKASFSPLTFTTVGQYTYRVYQKPSQNKDYQADTTVFDVLVYVTYDEDGTLVAKVISRRAGDEEKSAITFKPKWLVKPIPPRQPNIPKTPLPLAGEVKSLLGILSIVLLGLLVLLYVKKLKSRL

SEQ ID NO: 62 - protein, 401 aa, Streptococcus agalactiae
MVRFDLKHVQTLHSLSQLPISVMSQDKALIQVYGNDDYLLCYYQFLKHLAIPQAAQDVIFYEGLFEESFMIFPLCHYIIAIGPFYPYSLNKDYQEQLANNCLKHSSHRSKEELLSYMALVPHFPINNVRNLLIAIDAFFDTQFETTCQQTIHQLLQHSKQMTADPDIIHRLKHISKASSQLPPVLEHLNHIMDLVKLGNPQLLKQEINRIPLSSITSSSISALRAEKNLTVIYLTRLLEFSFVENTDVAKHYSLVKYYMALNEEASDLLKVLRIRCAAIIHFSESLTNKSISDKRQMYNSVLHYVDSHLYSKLKVSDIAKRLYVSESHLRSVFKKYSNVSLQHYILSTKIKEAQLLLKRGIPVGEVAKSLYFYDTTHFHKIFKKYTGISSKDYLAKYRDNI

SEQ ID NO: 63 - protein, 656 aa, Streptococcus agalactiae
MSSSDEETLKQYASKYTSNRRGDTSGNLKKQIAKVLTEGYPTNKSDWLNGLTENEKIEVTQDAIWYFTETTVPADRSYTNRNVNSQKMKEVYQKLIDTTDIDKYEDVQFDLFVPQDTNLQAVISVEPVIESLPWTSLKPIAQKDITAKKIWVDAPKEKPIIYFKLYRQLPGEKEVAVDDAELKQINSEGQQEISVTWTNQLVTDEKGMAYIYSVKEVDKNGELLEPKDYIKKEDGLTVTNTYVKPTSGHYDIEVTFGNGHIDITEDTTPDIVSGENQMKQIEGEDSKPIDEVTENNLIEFGKNTMPGEEDGTNSNKYEEVEDSRPVDTLSGLSSEQGQSGDMTIEEDSATHIKFSKRDIDGKELAGATMELRDSSGKTISTWISDGQVKDFYLMPGKYTFVETAAPDGYEVATAITFTVNEQGQVTVNGKATKGDAHIVMVDAYKPTKGSGQVIDIEEKLPDEQGHSGSTTEIEDSKSSDVIIGGQGEVVDTTEDTQSGMTGHSGSTTEIEDSKSSDVIIGGQGEVVDTTEDTQSGMTGHSGSTTKIEDSKSSDVIVGGQGQIVETTEDTQTGMHGDSGRKTEVEDTKLVQSFHFDNKEPESNSEIPKKDKSKSNTSLPATGEKQHNKFFWMVTSCSLISSVFVISLKSKKRLSSC

SEQ ID NO: 64 - protein, 511 aa, Streptococcus agalactiae; identical to SEQ ID NO: 56

SEQ ID NO: 65 - protein, 744 aa, Streptococcus agalactiae; identical to SEQ ID NO: 57

SEQ ID NO: 66 - protein, 173 aa, Streptococcus agalactiae; identical to SEQ ID NO: 58

SEQ ID NO: 67 - protein, 349 aa, Streptococcus agalactiae
MEREKMKKNKLLLATAILATALGTASLNQNVKAETAGVSENAKLIVKKTFDSYTDNEVLMPKADYTFKVEADSTASGKTKDGLEIKPGIVNGLTEQIISYTNTDKPDSKVKSTEFDFSKVVFPGIGVYRYTVSEKQGDVEGITYDTKKWTVDVYVGNKEGGGFEPKFIVSKEQGTDVKKPVNFNNSFATTSLKVKKNVSGNTGELQKEFDFTLTLNESTNFKKDQIVSLQKGNEKFEVKIGTPYKFKLKNGESIQLDKLPVGITYKVNEMEANKDGYKTTASLKEGDGQSKMYQLDMEQKTDESADEIVVTNKRDTQVPTGVVGTLAPFAVLSIVAIGGVIYITKRKKA

SEQ ID NO: 68 - protein, 241 aa, Streptococcus agalactiae
MVMTIVQVINKAIDTLILIFCLVVLFLAGFGLWDSYHLYQQADASNFKKFKTAQQQPKFEDLLALNEDVIGWLNIPGTHIDYPLVQGKTNLEYINKAVDGSVAMSGSLFLDTRNHNDFTDDYSLIYGHHMAGNAMFGEIPKFLKKDFFSKHNKAIIETKERKKLTVTIFACLKTDAFNQLVFNPNAITNQDQQRQLVDYISKRSKQFKPVKLKHHTKFVAFSTCENFSTDNRVIVVGTIQE

SEQ ID NO: 69 - protein, 189 aa, Streptococcus agalactiae
MLFSVVMILTMLAFNQTVLAKDSTVQTSISVENVLERAGDSTPFSIALESIDAMKTIEEITIAGSGKASFSPLTFTTVGQYTYRVYQKPSQNKDYQADTTVFDVLVYVTYDEDGTLVAKVISRRAGDEEKSAITFKPKWLVKPIPPRQPNIPKTPLPLAGEVKSLLGILSIVLLGLLVLLYVKKLKSRL

SEQ ID NO: 70 - protein, 285 aa, Streptococcus agalactiae
MALVPHFPINNVRNLLIAIDAFFDTQFETTCQQTIHQLLQHSKQMTADPDIIHRLKHISKASSQLPPVLEHLNHIMDLVKLGNPQLLKQEINRIPLSSITSSSISALRAEKNLTVIYLTRLLEFSFVENTDVAKHYSLVKYYMALNEEASDLLKVLRIRCAAIIHFSESLTNKSISDKRQMYNSVLHYVDSHLYSKLKVSDIAKRLYVSESHLRSVFKKYSNVSLQHYILSTKIKEAQLLLKRGIPVGEVAKSLYFYDTTHFHKIFKKYTGISSKDYLAKYRDNI

SEQ ID NO: 71 - protein, 733 aa, Streptococcus agalactiae
MTQKNSYKLSFLLSLTGFILGLLLVFIGLSGVSVGHAETRNGANKQGAFEIKKNKSQEEYNYEVYDNRNILQDGEHKLEIKRVDGTGKTYQGFCFQLTKNFPTAQGVSKKLYKKLSSSDEETLKQYASKYTSNRRGDTSGNLKKQIAKVLTEGYPTNKSDWLNGLTENEKIEVTQDAIWYFTETTVPADRSYTNRNVNSQKMKEVYQKLIDTTDIDKYEDVQFDLFVPQDTNLQAVISVEPVIESLPWTSLKPIAQKDITAKKIWVDAPKEKPIIYFKLYRQLPGEKEVAVDDAELKQINSEGQQEISVTWTNQLVTDEKGMAYIYSVKEVDKNGELLEPKDYIKKEDGLTVTNTYVKPTSGHYDIEVTFGNGHIDITEDTTPDIVSGENQMKQIEGEDSKPIDEVTENNLIEFGKNTMPGEEDGTNSNKYEEVEDSRPVDTLSGLSSEQGQSGDMTIEEDSATHIKFSKRDIDGKELAGATMELRDSSGKTISTWISDGQVKDFYLMPGKYTFVETAAPDGYEVATAITFTVNEQGQVTVNGKATKGDAHIVMVDAYKPTKGSGQVIDIEEKLPDEQGHSGSTTEIEDSKSSDVIIGGQGEVVDTTEDTQSGMTGHSGSTTKIEDSKSSDVIVGGQGQIVETTEDTQTGMHGDSGRKTEVEDTKLVQSFHFDNKEPESNSEIPKKDKSKSNTSLPATGEKQHNKFFWMVTSCSLISSVFVISLKSKKRLSSC

SEQ ID NO: 72 - protein, 217 aa, Streptococcus agalactiae
MPYVKKKKDSFLVETYLEQSIRDKSELVLLLFKSPTIIFSHVAKQTGLTAVQLKYYCKELDDFFGNNLDITIKKGKIICCFVKPVKEFYLHQLYDTSTILKLLVFFIKNGTTSQPLIKFSKKYFLSSSSAYRLRESLIKLLREFGLRVSKNTIVGEEYRIRYLIAMLYSKFGIVIYPLDHLDNQIIYRFLSQSATNLRTSPWLEEPFSFYNMLLALS

SEQ ID NO: 73 - protein, 524 aa, Streptococcus agalactiae
MQKRDKTNYGSANNKRRQTTIGLLKVFLTFVALIGIVGFSIRAFGAEEQSTETKKTSVIIRKYAEGDYSKLLEGATLKLAQIEGSGFQEQSFESSTSGQKLQLSDGTYILTETKSPQGYEIAEPITFKVTAGKVFIKGKDGQFVENQNKEVAEPYSVTAYNDFDDSGFINPKTFTPYGKFYYAKNANGTSQVVYCFNVDLHSPPDSLDKGETIDPDFNEGKEIKYTHILGADLFSYANNPRASTNDELLSQVKKVLEKGYRDDSTTYANLTSVEFRAATQLAIYYFTDSVDLDNLADYHGFGALTTEALNATKEIVAYAEDRANLPNISNLDFYVPNSNKYQSLIGTQYHPESLVDIIRMEDKQAPIIPITHKLTISKTVTGTIADKKKEFNFEIHLKSSDGQAISGTYPTNSGELTVTDGKATFTLKDGESLIVEGLPSGYSYEITETGASDYEVSVNGKNAPDGKATKASVKEDETITFENRKDLVPPTGLTTDGAIYLWLLLLVLLGLWVWLIGRKGLKND

SEQ ID NO: 74 - protein, 173 aa, Streptococcus agalactiae
MTNYLNRLNENPLFKAFIRLVLKISIIGFLGYILFQYIFGVMIINTNVMSPALSAGDGILYYRLTDRYHINDVVVYEVDNTLKVGRIVAQAGDEVSFTQEGGLLINGHPPEKEVPYLTYPHSSGPNFPYKVPTGTYFILNDYREERLDSRYYGALPINQIKGKISTLLRVRGI

SEQ ID NO: 75 - protein, 344 aa, Streptococcus agalactiae
MKKNKLLLATAILATALGTASLNQNVKAETAGVIDGSTLVVKKTFPSYTDDKVLMPKADYTFKVEADDNAKGKTKDGLDIKPGVIDGLENTKTIHYGNSDKTTAKEKSVNFDFANVKFPGVGVYRYTVSEVNGNKAGIAYDSQQWTVDVYVVNREDGGFEAKYIVSTEGGQSDKKPVLFKNFFDTTSLKVTKKVTGNTGEHQRSFSFTLLLTPNECFEKGQVVNILQGGETKKVVIGEEYSFTLKDKESVTLSQLPVGIEYKVTEEDVTKDGYKTSATLKDGDVTDGYNLGDSKTTDKSTDEIVVTNKRDTQVPTGVVGTLAPFAVLSIVAIGGVIYITKRKKA

SEQ ID NO: 76 - protein, 246 aa, Streptococcus agalactiae
MISQRMMMTIVQVINKAIDTLILIFCLVVLFLAGFGLWDSYHLYQQADASNFKKFKTAQQQPKFEDLLALNEDVIGWLNIPGTHMDYPLVQGKTNLEYINKAVDGSVAMSGSLFLDTRNHNDFTDDYSLIYGHHMAGNAMFGEIPKFLKKDFFNKHNKAIIETKERKKLTVTIFACLKTDAFDQLVFNPNAITNQDQQRQLVDYISKRSKQFKPVKLKHHTKFVAFSTCENFSTDNRVIVVGTIQE

SEQ ID NO: 77 - protein, 195 aa, Streptococcus agalactiae
MRKYWKMLFSVVMILTMLAFNQTVLAKDSTVQTSISVENVLERAGDSTSFSVALESIDAMKTIDEITIAGSGKASFSPLTFTTVGQYTYRVYQKPSQNKDYQADTTVFDVLVYVTYDEDGTLVAKVISRRAGDEEKSAITFKPKRLVKPIPPRQPDIPKTPLPLAGEVKSLLGILSIVLLGLLVLLYVKKLKSRL

SEQ ID NO: 78 - protein, 401 aa, Streptococcus agalactiae
MAIFDLKHVQTLHSLSQLPISVMSQDKALIQVYGNDDYLLCYYQFLKHLAIPQAAQDVIFYEGLFEESFMIFPLCHYIIAIGPFYPYSLNKDYQEQLANNCLKHSSHRSKEELLSYMALVPHFPINNVRNLLIAIDAFFDTQFETTCQQTIHQLLQHSKQMTADPDIIHRLKHISKASSQLPPVLEHLNHIMDLVKLGNPQLLKQEINRIPLSSITSSSISALRAEKNLTVIYLTRLLEFSFVENTDVAKHYSLVKYYMALNEEASDLLKVLRIRCAAIIHFSESLTNKSISDKRQMYNSVLHYVDSHLYSKLKVSDIAKRLYVSESHLRSVFKKYSNVSLQHYILSTKIKEAQLLLKRGIPVGEVAKSLYFYDTTHFHKIFKKYTGISSKDYLAKYRDNI

SEQ ID NO: 79 - protein, 696 aa, Streptococcus agalactiae
MTQKNSYKLSFLLSLTGFILGLLLVFIGLSGVSVGHAETRNGANKQGAFEIKKNKSQEEYNYEVYDNRNILQDGEHKLEIKRVDGTGKTYQGFCFQLTKNFPTAQGVSKKLYKKLSSSDEETLKQYASKYTSNRRGDTSGNLKKQIAKVLTEGYPTNKSDWLNGLTENEKIEVTQDAIWYFTETTVPADRSYTNRNVNSQKMKEVYQKLIDTTDIDKYEDVQFDLFVPQDTNLQAVISVEPVIESLPWTSLKPIAQKDITAKKIWVDAPKEKPIIYFKLYRQLPGEKEVAVDDAELKQINSEGQQEISVTWTNQLVTDEKGMAYIYSVKEVDKNGELLEPKDYIKKEDGLTVTNTYVKPTSGHYDIEVTFGNGHIDITEDTTPDIVSGENQMKQIEGEDSKPIDEVTENNLIEFGKNTMPGEEDGTNSNKYEEVEDSRPVDTLSGLSSEQGQSGDMTIEEDSATHIKFSKRDIDGKELAGATMELRDSSGKTISTWISDGQVKDFYLMPGKYTFVETAAPDGYEIATAITFTVNEQGQVTVNGKATKGDAHIVMVDAYKPTKGSGQVIDIEEKLPDEQGHSGSTTEIEDSKSSDVIIGGQGQIVETTEDTQTGMHGDSGCKTEVEDTKLVQSFHFDNKESESNSEIPKKDKPKSNTSLPATGEKQHNMFFWMVTSCSLISSVFVISLKTKKRLSSC

SEQ ID NO: 80 - protein, 283 aa, Streptococcus pneumoniae
MSRTKLRALLGYLLMLVACLIPIYCFGQMVLQSLGQVKGHATFVKSMTTEMYQEQQNHSLAYNQRLASQNRIVDPFLAEGYEVNYQVSDDPDAVYGYLSIPSLEIMEPVYLGADYHHLGMGLAHVDGTPLPLDGTGIRSVIAGHRAEPSHVFFRHLDQLKVGDALYYDNGQEIVEYQMMDTEIILPSEWEKLESVSSKNIMTLITCDPIPTFNKRLLVNFERVAVYQKSDPQTAAVARVAFTKEGQSVSRVATSQWLYRGLVVLAFLGILFVLWKLARLLRGK

SEQ ID NO: 81 - protein, 261 aa, Streptococcus pneumoniae
MSRYYYRIESNEVIKEFDETVSQMDKAELEERWRLAQAFNATLKPSEILDPFTEQEKKKGVSEYANMLKVHERIGYVEIPAIDQEIPMYVGTSEDILQKGAGLLEGASLPVGGENTHTVITAHRGLPTAELFSQLDKMKKGDIFYLHVLDQVLAYQVDQIVTVEPNDFEPVLIQHGEDYATLLTCTPYMINSHRLLVRGKRIPYTAPIAERNRAVRERGQFWLWLLLGAMAVILLLLYRVYRNRRIVKGLEKQLEGRHVKD

SEQ ID NO: 82 - protein, 279 aa, Streptococcus pneumoniae
MAVMAYPLVSRLYYRVESNQQIADFDKEKATLDEADIDERMKLAQAFNDSLNNVVSGDPWSEEMKKKGRAEYARMLEIHERMGHVEIPVIDVDLPVYAGTAEEVLQQGAGHLEGTSLPIGGNSTHAVITAHTGLPTAKMFTDLTKLKVGDKFYVHNIKEVMAYQVDQVKVIEPTNFDDLLIVPGHDYVTLLTCTPYMINTHRLLVRGHRIPYVAEVEEEFIAANKLSHLYRYLFYVAVGLIVILLWIIRRLRKKKKQPEKALKALKAARKEVKVEDGQQ

SEQ ID NO: 83 - protein, 43 aa, Streptococcus pneumoniae
MFLPFLSASLYLQTHHFIAFPNRQSYLLRETRKSHFFLIHHPF

SEQ ID NO: 84 - protein, 393 aa, Streptococcus pneumoniae
MISRIFFVMALCFSLVWGAHAVQAQEDHTLVLQLENYQEVVSQLPSRDGHRLQVWKLDDSYSYDDRVQIVRDLHSWDENKLSSFKKTSFEMTFLENQIEVSHIPNGLYYVRSIIQTDAVSYPAEFLFEMTDQTVEPLVIVAKKTDTMTTKVKLIKVDQDHNRLEGVGFKLVSVARDVSEKEVPLIGEYRYSSSGQVGRTLYTDKNGEIFVTNLPLGNYRFKEVEPLAGYAVTTLDTDVQLVDHQLVTITVVNQKLPRGNVDFMKVDGRTNTSLQGAMFKVMKEESGHYTPVLQNGKEVVVTSGKDGRFRVEGLEYGTYYLWELQAPTGYVQLTSPVSFTIGKDTRKELVTVVKNNKRPRIDVPDTGEETLYILMLVAILLFGSGYYLTKKPNN

SEQ ID NO: 85 - protein, 665 aa, Streptococcus pneumoniae
MKSINKFLTMLAALLLTASSLFSAATVFAAGTTTTSVTVHKLLATDGDMDKIANELETGNYAGNKVGVLPANAKEIAGVMFVWTNTNNEIIDENGQTLGVNIDPQTFKLSGAMPATAMKKLTEAEGAKFNTANLPAAKYKIYEIHSLSTYVGEDGATLTGSKAVPIEIELPLNDVVDAHVYPKNTEAKPKIDKDFKGKANPDTPRVDKDTPVNHQVGDVVEYEIVTKIPALANYATANWSDRMTEGLAFNKGTVKVTVDDVALEAGDYALTEVATGFDLKLTDAGLAKVNDQNAEKTVKITYSATLNDKAIVEVPESNDVTFNYGNNPDHGNTPKPNKPNENGDLTLTKTWVDATGAPIPAGAEATFDLVNAQTGKVVQTVTLTTDKNTVTVNGLDKNTEYKFVERSIKGYSADYQEITTAGEIAVKNWKDENPKPLDPTEPKVVTYGKKFVKVNDKDNRLAGAEFVIANADNAGQYLARKADKVSQEEKQLVVTTKDALDRAVAAYNALTAQQQTQQEKEKVDKAQAAYNAAVIAANNAFEWVADKDNENVVKLVSDAQGRFEITGLLAGTYYLEETKQPAGYALLTSRQKFEVTATSYSATGQGIEYTAGSGKDDATKVVNKKITIPQTGGIGTIIFAVAGAAIMGIAVYAYVKNNKDEDQLA

SEQ ID NO: 86 - protein, 893 aa, Streptococcus pneumoniae
MLNRETHMKKVRKIFQKAVAGLCCISQLTAFSSIVALAETPETSPAIGKVVIKETGEGGALLGDAVFELKNNTDGTTVSQRTEAQTGEAIFSNIKPGTYTLTEAQPPVGYKPSTKQWTVEVEKNGRTTVQGEQVENREEALSDQYPQTGTYPDVQTPYQIIKVDGSEKNGQHKALNPNPYERVIPEGTLSKRIYQVNNLDDNQYGIELTVSGKTVYEQKDKSVPLDVVILLDNSNSMSNIRNKNARRAERAGEATRSLIDKITSDSENRVALVTYASTIFDGTEFTVEKGVADKNGKRLNDSLFWNYDQTSFTTNTKDYSYLKLTNDKNDIVELKNKVPTEAEDHDGNRLMYQFGATFTQKALMKADEILTQQARQNSQKVIFHITDGVPTMSYPINFNHATFAPSYQNQLNAFFSKSPNKDGILLSDFITQATSGEHTIVRGDGQSYQMFTDKTVYEKGAPAAFPVKPEKYSEMKAAGYAVIGDPINGGYIWLNWRESILAYPFNSNTAKITNHGDPTRWYYNGNIAPDGYDVFTVGIGINGDPGTDEATATSFMQSISSKPENYTNVTDTTKILEQLNRYFHTIVTEKKSIENGTITDPMGELIDLQLGTDGRFDPADYTLTANDGSRLENGQAVGGPQNDGGLLKNAKVLYDTTEKRIRVTGLYLGTDEKVTLTYNVRLNDEFVSNKFYDTNGRTTLHPKEVEQNTVRDFPIPKIRDVRKYPEITISKEKKLGDIEFIKVNKNDKKPLRGAVFSLQKQHPDYPDIYGAIDQNGTYQNVRTGEDGKLTFKNLSDGKYRLFENSEPAGYKPVQNKPIVAFQIVNGEVRDVTSIVPQDIPAGYEFTNDKHYITNEPIPPKREYPRTGGIGMLPFYLIGCMMMGGVLLYTRKHP

SEQ ID NO: 87 - protein, 509 aa, Streptococcus pneumoniae
MLNKYIEKRITDKITILNILLDIRSIELDELSTLTSLQSKSLLSILQELQETFEEELTFNLDTQQVQLIEHHSHQTNYYFHQLYNQSTILKILRFFLLQGNQSFNEFTQKEYISIATGYRVRQKCGLLLRSVGLDLVKNQVVGPEYRIRFLIALLQFHFGIEIYDLNDGSMDWVTHMIVQSNSQLSHELLEITPDEYVHFSILVALTWKRREFPLEFPESKEFEKLKNLFMYPILMEHCQTYLEPHANMTFTQEELDYIFLVYCSANSSFSKDKWNQEKKTHTIQLILQHTRGKHLLSKFKNILGNDISNSLSFLTALTFLTRTFLFGLQNLVPYYNYYEHYGIESDKPLYHISKAIVQEWMTEQKIEGVIDQHRLYLFSLYLTETIFSSLPAIPIFIILNNQADVNLIKSIILRNFTDKVASVTGYNILISPPPSEEHLTEPLIIITTKEYLPYVKKQYPKGKHHFLTIALDLHVSQQRLIYQTIVDIRKEAFDKRVAMIAKKAHYLL

SEQ ID NO: 88 - DNA, 1533 bp, Streptococcus agalactiae
atgccttatgtcaaaaagaaaaaggatagtttcttagtagaaacatatcttgaacagtctattagagataaaagtgaattagtcttactgttatttaaatcgcctactatcattttttctcatgttgctaaacaaactggtctgacggctgtacaattaaaatattactgtaaagaacttgatgacttttttggaaataatttagacattaccattaaaaagggcaaaataatatgttgttttgtcaaacctgttaaggaattctaccttcatcaactctatgacacatcaacaatattaaaattattagttttctttattaaaaatggaacgtcatcacaacctctgattaaattttcaaaaaagtattttctatcaagctcctcagcttatcgactacgggaatcgctgatcaaattactacgggaatttggcttgagagtctcaaaaaatacaattgtcggagaggaatatcgtattcgctatcttattgccatgctatatagtaaatttggcattgtcatctatccgttagatcatctagacaatcaaattatttatcgcttcttatcacaaagtgcaaccaatttaagaacatcgccctggctagaggaacctttttctttttataatatgttacttgccttgtcatggaaacgtcaccaatttgcagttagcattcctcaaacacgtatttttcgacaattaaaaaagctttttatctatgattgtttaactcgaagcagtcgacaagtaatcgaaaatgctttttcgttaatgttctcacaaggagatctcgattatctttttttaatttatattaccaccaataattcctttgccagcctacaatggactccacagcatattgaaacttgctgccatatttttgaaaaaaatgacacatttcggttattgttagagcccattcttaaacgtttaccgcaattaaaccattctaaacaagaccttattaaagcccttatgtatttttcaaaatcttttctatttaacctccaacatttcgtcatcgagattccttctttttccttgccgacctatacaggcaactctaatctttacaaagctttaaaaaatattgtaaatcagtggcttgctcaattacccggaaagcgtcatcttaacgaaaagcatctccaacttttttgctctcatattgaacaaatcttaaaaaataaacaacctgctttaactgtcgttttaatatctagtaactttataaatgctaaactccttacagatactatcccacgatatttttctgataaaggaattcatttttattctttttacttattaagagatgatatctatcaaattccaagcttaaaaccagatttagttatcactcatagccgattaattccttttgttaagaatgatctggtcaaaggtgttactgttgctgaattttcttttgataaccctgactactctattgcttcaattcaaaacttgatatatcagctcaaagataaaaaatatcaagattttctaaacgagcaattacaa

SEQ ID NO: 89 - protein, 511 aa, Streptococcus agalactiae
MPYVKKKKDSFLVETYLEQSIRDKSELVLLLFKSPTIIFSHVAKQTGLTAVQLKYYCKELDDFFGNNLDITIKKGKIICCFVKPVKEFYLHQLYDTSTILKLLVFFIKNGTSSQPLIKFSKKYFLSSSSAYRLRESLIKLLREFGLRVSKNTIVGEEYRIRYLIAMLYSKFGIVIYPLDHLDNQIIYRFLSQSATNLRTSPWLEEPFSFYNMLLALSWKRHQFAVSIPQTRIFRQLKKLFIYDCLTRSSRQVIENAFSLMFSQGDLDYLFLIYITTNNSFASLQWTPQHIETCCHIFEKNDTFRLLLEPILKRLPQLNHSKQDLIKALMYFSKSFLFNLQHFVIEIPSFSLPTYTGNSNLYKALKNIVNQWLAQLPGKRHLNEKHLQLFCSHIEQILKNKQPALTVVLISSNFINAKLLTDTIPRYFSDKGIHFYSFYLLRDDIYQIPSLKPDLVITHSRLIPFVKNDLVKGVTVAEFSFDNPDYSIASIQNLIYQLKDKKYQDFLNEQLQ

SEQ ID NO: 90 - DNA, 1569 bp, Streptococcus agalactiae
ttgcaaaagagggataaaaccaattatggaagcgctaacaacaaacgacgacaaacgacgatcggattactgaaagtatttttgacgtttgtagctctgataggaatagtagggttttctatcagagcgttcggagctgaagaaaaatctactgaaactaaaaaaacgtcagtcattattagaaaatatgctgaaggtgactactctaaacttctagagggagcaactttgcgtttaacaggggaagatatcccagattttcaagaaaaagtcttccaaagtaatggaacaggagaaaagattgaattatcaaatgggacttataccttaacagaaacatcatctccagatggatataaaattacggagccgattaagtttagagtagtgaataaaaaagtatttatcgtccaaaaagatggttctcaagtggaaaacccaaacaaagaactaggttctccatatactatagaggcatacaatgattttgatgaatttggcttactgtcaacacaaaattatgcgaaattttattatggaaaaaactatgatggcagttcacaaattgtttattgcttcaatgccaacttgaaatctccacctgactcggaagatcatggtgctacaataaatcctgactttacgactggtgatattaggtacagtcatattgctggttcagatttgataaaatacgctaatacagctagggatgaagatcctcaattatttttaaaacacgtaaaaaaagtaattgaaaatgggtatcataaaaaaggtcaagctattccatataacggtctgactgaggcacagtttcgtgcggctactcaactggcaatttattattttacagatagtgttgacttaactaaggatagattgaaagacttccatggatttggagatatgaatgatcaaactttgggtgtagctaaaaaaattgtagaatacgctttgagtgatgaagattcaaaactaacaaatcttgatttcttcgtacctaataatagcaaataccaatctcttattgggacagaataccatccagatgatttggttgacgtgattcgtatggaagataaaaagcaagaagttattccagtaactcatagtttgacggtgcaaaaaacagtagtcggtgagttgggagataagactaaaggctttcaatttgaacttgagttgaaagataaaactggacagcctattgttaacactctaaaaactaataatcaagatttagtagctaaagatgggaaatattcatttaatctaaagcatggtgacaccataagaatagaaggattaccgacgggatattcttataccctgaaagagactgaagctaaggattatatagtaactgttgataacaaagttagtcaagaagctcaatcagcaagtgagaatgtcacagcagacaaagaagtcacttttgaaaaccgaaaagatcttgtcccaccaactggtttgacaacagatggggctatctatctttggttattactacttgttccatttgggttattggtttggctatttggtcgtaaagggttaaaaaatgac

SEQ ID NO: 91 - protein, 523 aa, Streptococcus agalactiae
MQKRDKTNYGSANNKRRQTTIGLLKVFLTFVALIGIVGFSIRAFGAEEKSTETKKTSVIIRKYAEGDYSKLLEGATLRLTGEDIPDFQEKVFQSNGTGEKIELSNGTYTLTETSSPDGYKITEPIKFRVVNKKVFIVQKDGSQVENPNKELGSPYTIEAYNDFDEFGLLSTQNYAKFYYGKNYDGSSQIVYCFNANLKSPPDSEDHGATINPDFTTGDIRYSHIAGSDLIKYANTARDEDPQLFLKHVKKVIENGYHKKGQAIPYNGLTEAQFRAATQLAIYYFTDSVDLTKDRLKDFHGFGDMNDQTLGVAKKIVEYALSDEDSKLTNLDFFVPNNSKYQSLIGTEYHPDDLVDVIRMEDKKQEVIPVTHSLTVQKTVVGELGDKTKGFQFELELKDKTGQPIVNTLKTNNQDLVAKDGKYSFNLKHGDTIRIEGLPTGYSYTLKETEAKDYIVTVDNKVSQEAQSASENVTADKEVTFENRKDLVPPTGLTTDGAIYLWLLLLVPFGLLVWLFGRKGLKND

SEQ ID NO: 92 - DNA, 519 bp, Streptococcus agalactiae
atgactaattacctaaatcgtttaaatgagaattcactatttaaagctttcatacggttagtacttaagatttctattattgggtttctaggttacattctatttcagtatgtttttggtgttatgattattaacactaatgatatgagtcctgctttaagtgcaggtgacggtgttttatattatcgtttgactgatcgctatcatattaatgatgtggtggtctatgaggttgataacactttgaaagttggtcgaattgtcgctcaagctggcgatgaggttagttttacgcaagaaggaggactgttgattaatgggcatccaccagaaaaagaggtcccttacctgacgtatcctcactcaagtggcccaaactttccctataaagttcctacgggtaagtatttcatattgaatgattatcgtgaagaacgtttggacagtcgttattatggggcgttacccgtcaatcaaataaaagggaaaatctcaactctattaagagtgagaggaatt

SEQ ID NO: 93 - protein, 173 aa, Streptococcus agalactiae
MTNYLNRLNENSLFKAFIRLVLKISIIGFLGYILFQYVFGVMIINTNDMSPALSAGDGVLYYRLTDRYHINDVVVYEVDNTLKVGRIVAQAGDEVSFTQEGGLLINGHPPEKEVPYLTYPHSSGPNFPYKVPTGKYFILNDYREERLDSRYYGALPVNQIKGKISTLLRVRGI

SEQ ID NO: 94 - DNA, 1056 bp, Streptococcus agalactiae
ttggagagagaaaaaatgaaaaaaaacaaattattacttgctactgcaatcttagcaactgctttaggaacagcttctttaaatcaaaacgtaaaagctgagacggcaggggttgtaacaggaaaatcactacaagttacaaagacaatgacttatgatgatgaagaggtgttaatgcccgaaaccgcctttacttttactatagagcctgatatgactgcaagtggaaaagaaggcagcctagatattaaaaatggaattgtagaaggcttagacaaacaagtaacagtaaaatataagaatacagataaaacatctcaaaaaactaaaatagcacaatttgatttttctaaggttaaatttccagctataggtgtttaccgctatatggtttcagagaaaaacgataaaaaagacggaattacgtacgatgataaaaagtggactgtagatgtttatgttgggaataaggccaataacgaagaaggtttcgaagttctatatattgtatcaaaagaaggtacttctagtactaaaaaaccaattgaatttacaaactctattaaaactacttccttaaaaattgaaaaacaaataactggcaatgcaggagatcgtaaaaaatcattcaacttcacattaacattacaaccaagtgaatattataaaactggatcagttgtgaaaatcgaacaggatggaagtaaaaaagatgtgacgataggaacgccttacaaatttactttgggacacggtaagagtgtcatgttatcgaaattaccaattggtatcaattactatcttagtgaagacgaagcgaataaagacggctacactacaacggcaacattaaaagaacaaggcaaagaaaagagttccgatttcactttgagtactcaaaaccagaaaacagacgaatctgctgacgaaatcgttgtcacaaataagcgtgacactcaagttccaactggtgttgtagggacccttgctccatttgcagttcttagcattgtggctattggtggagttatctatattacaaaacgtaaaaaagct

SEQ ID NO: 95 - protein, 352 aa, Streptococcus agalactiae
MEREKMKKNKLLLATAILATALGTASLNQNVKAETAGVVTGKSLQVTKTMTYDDEEVLMPETAFTFTIEPDMTASGKEGSLDIKNGIVEGLDKQVTVKYKNTDKTSQKTKIAQFDFSKVKFPAIGVYRYMVSEKNDKKDGITYDDKKWTVDVYVGNKANNEEGFEVLYIVSKEGTSSTKKPIEFTNSIKTTSLKIEKQITGNAGDRKKSFNFTLTLQPSEYYKTGSVVKIEQDGSKKDVTIGTPYKFTLGHGKSVMLSKLPIGINYYLSEDEANKDGYTTTATLKEQGKEKSSDFTLSTQNQKTDESADEIVVTNKRDTQVPTGVVGTLAPFAVLSIVAIGGVIYITKRKKA

SEQ ID NO: 96 - DNA, 738 bp, Streptococcus agalactiae
gtgattagtcaaagaatgatgatgacaattgtacaggttatcaataaagccattgatactctcattcttatcttttgtttagtcgtactatttttagctggttttggtttgtgggattcttatcatctctatcaacaagcagacgcttctaatttcaaaaaatttaaaacagctcaacaacagcctaaatttgaagacttgttagctttgaatgaggatgtcattggttggttaaatatcccagggactcatattgattatcctctagttcagggaaaaacgaatttagagtatattaataaagcagttgatggcagtgttgccatgtctggtagtttatttttagatacacggaatcataatgattttacggacgattactctctgatttatggccatcatatggcaggtaatgccatgtttggcgaaattccaaaatttttaaaaaaggattttttcaacaaacataataaagctatcattgaaacaaaagagagaaaaaaactaaccgtcactatttttgcttgtctcaagacagatgcctttgaccagttagtttttaatcctaatgctattaccaatcaagaccaacaaaagcagctcgttgattatatcagtaaaagatcaaaacaatttaaacctgttaaattgaagcatcatacaaagttcgttgctttttcaacgtgtgaaaatttttctactgacaatcgtgttatcgttgtcggtactattcaagaa

SEQ ID NO: 97 - protein, 246 aa, Streptococcus agalactiae
MISQRMMMTIVQVINKAIDTLILIFCLVVLFLAGFGLWDSYHLYQQADASNFKKFKTAQQQPKFEDLLALNEDVIGWLNIPGTHIDYPLVQGKTNLEYINKAVDGSVAMSGSLFLDTRNHNDFTDDYSLIYGHHMAGNAMFGEIPKFLKKDFFNKHNKAIIETKERKKLTVTIFACLKTDAFDQLVFNPNAITNQDQQKQLVDYISKRSKQFKPVKLKHHTKFVAFSTCENFSTDNRVIVVGTIQE

SEQ ID NO: 98 - DNA, 672 bp, Streptococcus agalactiae
ttgctttttcaacgtgtgaaaatttttctactgacaatcgtgttatcgttgtcggtactattcaagaataacgaaaggaggagacttttgagaaaatattggaaaatgttattttctgtcgtaatgatattaaccatgctggcctttaatcagactgttttagcaaaagacagcactgttcaaactagcattagtgtcgaaaatgtcttagagagagcaggcgatagtaccccattttcggttgcattagaatcaattgatgcgatgaaaacaatagacgaaataacaattgctggttctggaaaagcaagcttttcccctctgaccttcacaacagttgggcaatatacttatcgtgtttatcagaagccttcacaaaataaagattatcaagcagatactactgtatttgacgttcttgtctatgtgacctatgatgaagatgggactctagtcgcaaaagttatttctcgaagggctggagacgaagaaaaatcagcgattacttttaagcccaaacggttagtaaaaccaataccgcctagacaacctaacatccctaaaaccccattaccattagctggtgaagtaaaaagtttattgggtatcttaagtatcgtattactggggttactagttcttctttatgttaaaaaactgaagagtaggcta

SEQ ID NO: 99 - protein, 224 aa, Streptococcus agalactiae
MLFQRVKIFLLTIVLSLSVLFKNNERRRLLRKYWKMLFSVVMILTMLAFNQTVLAKDSTVQTSISVENVLERAGDSTPFSVALESIDAMKTIDEITIAGSGKASFSPLTFTTVGQYTYRVYQKPSQNKDYQADTTVFDVLVYVTYDEDGTLVAKVISRRAGDEEKSAITFKPKRLVKPIPPRQPNIPKTPLPLAGEVKSLLGILSIVLLGLLVLLYVKKLKSRL

SEQ ID NO: 100 - DNA, 1236 bp, Streptococcus agalactiae
atgatacaactaaggatgggggcaatctatcaaatggttatattcgatttaaaacatgtgcaaacattacacagcttgtctcaattacctatttcagtgatgtcacaagataaggcacttattcaagtatatggtaatgacgactatttattatgttactatcaatttttaaagcatctagctattcctcaagctgcacaagatgttattttttatgagggtttatttgaagagtcctttatgatttttcctctttgtcactacattattgccattggacctttctatccttattcacttaataaagactatcaggaacaattagctaataattttttaaaacattcttctcatcgtagcaaagaagagctcttgtcctatatggcacttgtcccacattttccaattaataatgtgcggaaccttttgatagctattgacgctttttttgacacacaatttgagacgacttgccaacaaacgattcatcaattgttgcagcattcaaaacagatgactgctgatcctgatatcattcatcgccttaagcatattagcaaagcatctagccaattaccgcctgttttagagcacctaaatcatattatggatctggtaaagctaggcaatccacaattgctcaagcaagaaatcaatcgcatccccttatcaagtatcacctcatcttctatttctgctctaagggcggaaaagaacctcactgttatctatttaactaggttactggaattcagttttgtagaaaatactgacgtagcaaagcattatagccttgtcaaatactacatggccttaaatgaagaagcgagtgacttgctcaaagttttgagaattcgctgtgcagctatcatccatttttccgaatcattaaccaataaaagtatttctgataaacgtcaaatgtacaatagtgtgcttcattatgtcgatagtcacctgtattccaaattaaaggtatctgatatcgctaagcgcctatatgtttccgaatctcacttacgttcagtctttaaaaaatactcaaatgtttccttacaacattatattctaagtacaaaaatcaaagaagctcaactactcttaaaacgaggaattcctgttggagaagtggctaaaagcttatatttttatgacactacccattttcataaaatctttaaaaaatacacgggtatttcttcaaaagactatcttgctaaataccgagataatatt

SEQ ID NO: 101 - protein, 412 aa, Streptococcus agalactiae
MIQLRMGAIYQMVIFDLKHVQTLHSLSQLPISVMSQDKALIQVYGNDDYLLCYYQFLKHLAIPQAAQDVIFYEGLFEESFMIFPLCHYIIAIGPFYPYSLNKDYQEQLANNFLKHSSHRSKEELLSYMALVPHFPINNVRNLLIAIDAFFDTQFETTCQQTIHQLLQHSKQMTADPDIIHRLKHISKASSQLPPVLEHLNHIMDLVKLGNPQLLKQEINRIPLSSITSSSISALRAEKNLTVIYLTRLLEFSFVENTDVAKHYSLVKYYMALNEEASDLLKVLRIRCAAIIHFSESLTNKSISDKRQMYNSVLHYVDSHLYSKLKVSDIAKRLYVSESHLRSVFKKYSNVSLQHYILSTKIKEAQLLLKRGIPVGEVAKSLYFYDTTHFHKIFKKYTGISSKDYLAKYRDNI

SEQ ID NO: 102 - DNA, 2088 bp, Streptococcus agalactiae
atgacacaaaaaaatagctataagttaagcttcctgttatccctaacaggatttattttaggtttattattggtttttataggattgtccggagtatcagtaggacatgcggaaacaagaaatggagcaaacaaacaaggagcttttgaaatcaagaaaaataaaagtcaagaagaatataattatgaagtttatgataacagaaacatacttcaggatggggaacataaacttgaaataaaaagagttgatgggacaggtaaaacttatcaaggtttttgctttcagttaacgaaaaattttcccactgctcaaggtgtaagtaaaaagctgtataaaaaattgagtagtagtgatgaagaaacactaaagcaatatgcctctaagtatacaagtaataggagaggagatactagtggtaatcttaaaaagcaaattgctaaggttctgacagaaggttacccaactaacaaaagtgattggttaaatggattgactgaaaacgaaaaaatagaagtaacccaggatgcaatttggtattttacagaaacgacagttccggctgatagaagttatacgaatcgcaacgtaaatagtcaaaaaatgaaagaagtgtatcaaaagctaattgatacaacagatatagataaatatgaagatgtacaatttgatttatttgtgccacaagatacaaacttacaggcagtaattagtgtagagcctgttatcgaaagccttccttggacatcgttgaagccaatagcccagaaggatatcactgccaaaaaaatctgggtagatgcacctaaagaaaaaccaattatttattttaagctatatagacagctgcctggagaaaaggaagtagcagtggatgacgctgagctaaaacagataaatagtgaaggtcaacaagaaatatcagtaacttggacaaatcaacttgttacagatgaaaaaggaatggcttacatttattctgtaaaagaagtagataaaaatggcgagttacttgagccaaaagattatatcaagaaggaagatggacttacagttactaatacttatgtaaagccaactagtgggcactatgatatagaagtgacatttggaaatggacatattgatattacagaagatactacaccagatattgtttcaggtgaaaaccaaatgaagcaaatagagggagaagatagtaagcctattgatgaagtaacggaaaataatttaattgaatttggtaaaaacacgatgccaggtgaagaagatggcacaaattctaataagtatgaagaagtcgaagactcacgcccagttgataccttgtcaggtttatcaagtgagcaaggtcagtccggtgatatgacaattgaagaagatagtgctacccatattaaattctcaaaacgtgatattgacggcaaagagttagctggtgcaactatggagttgcgtgattcatctggtaaaactattagtacatggatttcagatggacaagtgaaagatttctacctgatgccaggaaaatatacatttgtcgaaaccgcagcaccagacggttatgagatagcaactgctattacctttacagttaatgagcaaggtcaggttactgtaaatggcaaagcaactaaaggtgacgctcatattgtcatggttgatgcttacaagccaactaagggttcaggtcaggttattgatattgaagaaaagcttccagacgagcagggccattctggctcaactactgaaatagaagatagcaagtcttcagacgttatcattggtggtcaggggcagattgtcgagacaacagaggatacccaaactggcatgcacggggattctggttgtaaaacggaagtcgaagatactaaactagtacaatccttccactttgataacaaggaatcagaaagtaactctgagattcctaaaaaagataagccaaagagtaatactagtttaccagcaactggtgagaagcaacataatatgttcttttggatggttacttcttgctcacttattagtagtgtttttgtaatatcactaaaaactaaaaaacgcctatcatcatgt

SEQ ID NO: 103 - protein, 696 aa, Streptococcus agalactiae; identical to SEQ ID NO: 79

SEQ ID NO: 104 - DNA, 1320 bp, Streptococcus agalactiae
atgaccatccaaaaaaggatgatatcttgccaatttacacatccttctaaagaaacttatctttaccaactctatgcatcatctaatgtcttacaattactagcgtttttaataaaaaatggttcccactctcgtccccttacggattttgcaagaagtcattttttatcaaactcctcagcttatcggatgcgcgaagcattgattcctttattaagaaactttgaattaaaactctctaagaacaagattgtcggtgaggaatatcgtatccgttacctcatcgctctgctatatagtaagtttggcattaaagtttatgacttgacgcagcaagacaaaaacattattcatagctttttatcccatagttccacccaccttaaaacttctccttggttatcggaatcgttttctttctatgacattttattagctttatcgtggaagcggcatcaattttcggtaactattccccaaaccagaatttttcaacaattaaaaaaactttttgtctacgattctttgaaaaaaagtagccgtgatattatcgaaacttactgccaactaaacttttcagcaggagatttggactacctctatttaatttatatcaccgctaataattcttttgcgagcttacaatggacacctgagcatatcagacaatgttgtcaactttttgaagaaaatgatacttttcgcctgcttttaaatcctatcatcactcttttacctaacctaaaagagcaaaaggctagtttagtaaaagctcttatgtttttttcaaaatcattcttgtttaatctgcaacattttattcctgagaccaacttattcgtttctccgtactataaaggaaaccaaaaactctatacgtccttaaagttaattgtcgaagagtggatggccaaacttcctggtaagcgttacttgaaccataagcattttcatcttttttgccactatgtcgagcaaattctaagaaatatccaacctcctttagttgttgttttcgtagccagtaattttatcaatgctcatctcctaacagattctttcccaaggtatttctcggataaaagcattgattttcattcctattatctattgcaagataatgtttatcaaattcctgatttaaagccagatttggtcatcactcacagtcaactgattccttttgttcaccatgaacttacaaaaggaattgctgttgctgaaatatcttttgatgaatcgattctgtctatccaagaattgatgtatcaagttaaagaggaaaaattccaagctgatttaaccaaacaattaacataa

SEQ ID NO: 105 - protein, 439 aa, Streptococcus agalactiae
MTIQKRMISCQFTHPSKETYLYQLYASSNVLQLLAFLIKNGSHSRPLTDFARSHFLSNSSAYRMREALIPLLRNFELKLSKNKIVGEEYRIRYLIALLYSKFGIKVYDLTQQDKNIIHSFLSHSSTHLKTSPWLSESFSFYDILLALSWKRHQFSVTIPQTRIFQQLKKLFVYDSLKKSSRDIIETYCQLNFSAGDLDYLYLIYITANNSFASLQWTPEHIRQCCQLFEENDTFRLLLNPIITLLPNLKEQKASLVKALMFFSKSFLFNLQHFIPETNLFVSPYYKGNQKLYTSLKLIVEEWMAKLPGKRYLNHKHFHLFCHYVEQILRNIQPPLVVVFVASNFINAHLLTDSFPRYFSDKSIDFHSYYLLQDNVYQIPDLKPDLVITHSQLIPFVHHELTKGIAVAEISFDESILSIQELMYQVKEEKFQADLTKQLT

SEQ ID NO: 106 - DNA, 2097 bp, Streptococcus agalactiae
atggtaagctcatatatgtttgcgagaggagagaaaatgaataacaaaatgtttttgaacaaagaagccggttttttggtacacacaaaaagaaaaaggcgatttgctgtcactttagtgggagtcttttttctgcttttggcatgtgcgggtgctatcggttttggtcaagtagcctatgctgcggatgagaagactgtgccgaattttaaaagcccagatccagattatccctggtatggttatgattcgtatagaggaatatttgcaagatatcacaatttaaaagtaaatctaaaaggaagtaaggagtatcaagcgtattgttttaacctaacaaaatactttcctcgccccacttatagtactacaaataatttttacaagaaaattgatgggagtggatcagcgttcaaatcttatgcagcgaatcctagggttttagatgagaatttagataaattagaaaaaaatatactgaatgtaatttataatggatataaaagtaatgcaaatggttttatgaatggtatagaagatcttaatgctatactagtaactcaaaacgctatttggtactattcagatagtgctccattaaatgatgttaataaaatgtgggaaagagaggttcggaatggggagattagtgagtcacaagttactttaatgcgtgaggcattgaaaaaactaattgatcccaatttagaagctactgcagctaataaaatcccatcaggatatcgtttaaatatctttaagtctgaaaatgaagattaccaaaatcttttaagtgctgaatatgtacctgatgatccccctaaacctggtgatacgtcagaacataatcctaaaactcccgagttggatggcactccaattcccgaggacccaaaacgtccagatgagagttcagaacctgcgcttcccccattaatgccagagctagatggtgaagaagtcccagaagttccaagcgagagcttagaacctgcgcttcccccattgatgccagagctagatggtgaagaagtcccagaagttccaagcgagagcttagaacctgcgcttcccccattgatgccagagctagatggtgaagaagtcccagaagttccaagcgagagcttagaacctgcgcttcccccattaatgccagagctagatggtgaagaagtcccagaagttccaagcgagagcttagaacctgcgcttcccccattgatgccagagttagatggtgaagaagtccctgaaaaacctagtgttgacttacctattgaagttcctcgttatgagtttaacaataaagaccagtcacctctagcgggtgagtctggtgagacggagtatattaccgaagtctatggaaatcaacagaaccctgttgatattgataaaaaacttccgaatgaaacaggtttttcaggaaatatggttgagacagaagatacgaaagagccagaagtgttgatgggaggtcaaagtgagtctgttgaatttactaaagacactcaaacaggcatgagtggtcaaacaactcctcaggttgagacagaagatacgaaagagccagaagtgttgatgggaggtcaaagtgagtctgttgaatttactaaagacactcaaacaggcatgagtggtcaaacaactcctcaggttgagacagaagatacgaaagagccaggagtgttgatgggaggccaaagtgagtctgttgaatttactaaagacactcaaacaggcatgagtggtcaaacaactcctcaggttgagacagaagacacgaaagagccaggagtgttgatgggaggtcaaagtgagtctgttgaatttactaaagacactcaaacaggcatgagcggtttcagtgaaacagtgaccattgttgaagatacgcgtccgaagttagtgttccattttgacaataatgagcccaaagtggaagagaatcgggaaaagcctacaaaaaatataacacctatccttcctgcaacaggagatattgagaatgttttggcctttcttggaatccttattttgtcagtactttctatttttagccttttaaaaaacaaacaaaacaataaagtctga

SEQ ID NO: 107 - protein, 698 aa, Streptococcus agalactiae
MVSSYMFARGEKMNNKMFLNKEAGFLVHTKRKRRFAVTLVGVFFLLLACAGAIGFGQVAYAADEKTVPNFKSPDPDYPWYGYDSYRGIFARYHNLKVNLKGSKEYQAYCFNLTKYFPRPTYSTTNNFYKKIDGSGSAFKSYAANPRVLDENLDKLEKNILNVIYNGYKSNANGFMNGIEDLNAILVTQNAIWYYSDSAPLNDVNKMWEREVRNGEISESQVTLMREALKKLIDPNLEATAANKIPSGYRLNIFKSENEDYQNLLSAEYVPDDPPKPGDTSEHNPKTPELDGTPIPEDPKRPDESSEPALPPLMPELDGEEVPEVPSESLEPALPPLMPELDGEEVPEVPSESLEPALPPLMPELDGEEVPEVPSESLEPALPPLMPELDGEEVPEVPSESLEPALPPLMPELDGEEVPEKPSVDLPIEVPRYEFNNKDQSPLAGESGETEYITEVYGNQQNPVDIDKKLPNETGFSGNMVETEDTKEPEVLMGGQSESVEFTKDTQTGMSGQTTPQVETEDTKEPEVLMGGQSESVEFTKDTQTGMSGQTTPQVETEDTKEPGVLMGGQSESVEFTKDTQTGMSGQTTPQVETEDTKEPGVLMGGQSESVEFTKDTQTGMSGFSETVTIVEDTRPKLVFHFDNNEPKVEENREKPTKNITPILPATGDIENVLAFLGILILSVLSIFSLLKNKQNNKV

SEQ ID NO: 108 - DNA, 2271 bp, Streptococcus agalactiae
atgaataacaaaaaattgcaaaagaagcaagatgctcctcgggtatcaaacagaaagccaaaacaattaactgtcactttagtgggagtatttttaatgtttttgaccttggtaagttccatgagaggtgctcaaagcatatttggagaggaaaagagaattgaagaagtcagtgttcctaaaataaaaagtccagatgatgcctacccttggtatggctatgattcatatgactctagtcatccttactatgaacgttttaaagtagcacatgatttaagggttaatttaaatggaagtaagagctaccaagtatattgctttaatatcaattctcattatccgaatagaaaaaatgctttttctaaacaatggtttaagagagttgatgggacaggtgatgtgttcacaaattatgctcagacacctaagattcgtggagaatcattgaataataaacttttaagtattatgtacaacgcttatcctaaaaatgctaatggctatatggataagatagaaccattaaatgctattttagtaactcaacaagctgtttggtactattctgacagttcttatggtaatataaaaacgttatgggcatctgagcttaaagacggaaaaatagattttgaacaagtaaaattaatgcgtgaagcttactcaaaactaattagtgatgatttagaagaaacatctaaaaataagctacctcaaggatctaaactgaatatttttgttccgcaagataaatctgttcaaaatttattaagtgcagagtacgtgcctgaatcccctccggcaccaggtcagtctccagaaccgccagtgcaaacaaaaaaaacatcagtcattatcagaaaatatgcggaaggtgactactctaaacttctagagggagcaactttgcgtttaacaggggaagatatcctagattttcaagaaaaagtcttccaaagtaatggaacaggagaaaagattgaattatcaaatgggacttataccttaacagaaacatcatctccagatggatataaaattgcggagccgattaagtttagagtagtgaataaaaaagtatttatcgtccaaaaagatggttctcaagtggaaaatccaaacaaagaagtagcagagccatactcagtggaagcgtacagcgatatgcaagatagtaactatattaatccagaaacgttcactccttatgggaaattttattacgctaaaaataaggataaaagttcacaagttgtctactgttttaatgctgatttacactctccacctgaatcagaggatgggggaggaactatagatcctgatattagtacgatgaaagaagtcaagtacacacatacggcaggtagtgatttgtttaaatacgcgctaagaccgagagatacaaatccagaagacttcttaaagcacattaaaaaagtaattgaaaaaggctacaataaaaaaggtgatagctataatggattaacagaaacacagtttcgcgcggctactcagcttgctatctattactttacagacagcactgacttaaaaaccttaaaaacttataacaatgggaaaggttaccatggatttgaatctatggatgaaaaaaccctagctgtaacaaaagaattaattaattacgctcaagataatagtgcccctcaactaacaaatcttgatttcttcgtacctaataatagcaaataccaatctcttattgggacagaataccatccagatgatttggttgacgtgattcgtatggaagataaaaagcaagaagttattccagtaactcacagtttgacagtgaaaaaaacagtagtcggtgagttgggagataaaactaaaggcttccaatttgaacttgagttgaaagataaaactggacagcctattgttaacactctaaaaactaataatcaagatttagtagctaaagatgggaaatattcatttaatctaaagcatggtgacaccataagaatagaaggattaccgacgggatattcttatactctgaaagagactgaagctaaggattatatagtaaccgttgataacaaagttagtcaagaagctcaatcagcaagtgagaatgtcacagcagacaaagaagtcacttttgaaaaccgtaaagatcttgtcccaccaactggttttattactgatggtggaacctatctgtggttattattgcttgtcccatttggtttgttagtgtggttctttggtcgtaaaggactaaaaaatgactaa

SEQ ID NO: 109 - protein, 756 aa, Streptococcus agalactiae
MNNKKLQKKQDAPRVSNRKPKQLTVTLVGVFLMFLTLVSSMRGAQSIFGEEKRIEEVSVPKIKSPDDAYPWYGYDSYDSSHPYYERFKVAHDLRVNLNGSKSYQVYCFNINSHYPNRKNAFSKQWFKRVDGTGDVFTNYAQTPKIRGESLNNKLLSIMYNAYPKNANGYMDKIEPLNAILVTQQAVWYYSDSSYGNIKTLWASELKDGKIDFEQVKLMREAYSKLISDDLEETSKNKLPQGSKLNIFVPQDKSVQNLLSAEYVPESPPAPGQSPEPPVQTKKTSVIIRKYAEGDYSKLLEGATLRLTGEDILDFQEKVFQSNGTGEKIELSNGTYTLTETSSPDGYKIAEPIKFRVVNKKVFIVQKDGSQVENPNKEVAEPYSVEAYSDMQDSNYINPETFTPYGKFYYAKNKDKSSQVVYCFNADLHSPPESEDGGGTIDPDISTMKEVKYTHTAGSDLFKYALRPRDTNPEDFLKHIKKVIEKGYNKKGDSYNGLTETQFRAATQLAIYYFTDSTDLKTLKTYNNGKGYHGFESMDEKTLAVTKELINYAQDNSAPQLTNLDFFVPNNSKYQSLIGTEYHPDDLVDVIRMEDKKQEVIPVTHSLTVKKTVVGELGDKTKGFQFELELKDKTGQPIVNTLKTNNQDLVAKDGKYSFNLKHGDTIRIEGLPTGYSYTLKETEAKDYIVTVDNKVSQEAQSASENVTADKEVTFENRKDLVPPTGFITDGGTYLWLLLLVPFGLLVWFFGRKGLKND

SEQ ID NO: 110 - DNA, 522 bp, Streptococcus agalactiae
atgactaattacctaaatcgcttaaatgagaatccactatttaaagctttcatacggttagtacttaagatttctattattggatttctaggttacattctatttcagtatgtttttggcgtcatgattgttaacacaaatcagatgagtcctgctgtaagtgctggtgatggagtcttatattatcgtttgactgatcgctatcatattaatgatgtggtggtctatgaggttgataacactttgaaagttggtcgaattgccgctcaagctggcgatgaggttagttttacgcaagaaggaggactgttgattaatgggcatccaccagaaaaagaggtcccttacctgacgtatcctcactcaagtggtccaaactttccctataaagttcctacgggtacgtatttcatattgaatgattatcgtgaagaacgtttggacagtcgttattatggggcgttacccatcaatcaaatcaaagggaaaatctcaactctattaagagtgagaggaatttaa

SEQ ID NO: 111 - protein, 173 aa, Streptococcus agalactiae
MTNYLNRLNENPLFKAFIRLVLKISIIGFLGYILFQYVFGVMIVNTNQMSPAVSAGDGVLYYRLTDRYHINDVVVYEVDNTLKVGRIAAQAGDEVSFTQEGGLLINGHPPEKEVPYLTYPHSSGPNFPYKVPTGTYFILNDYREERLDSRYYGALPINQIKGKISTLLRVRGI

SEQ ID NO: 112 - DNA, 1029 bp, Streptococcus agalactiae
atgaaaaaaaataaattattacttgctactgcaatcttagcaactgctttaggaacagcttctttaaatcaaaacgtaaaagctgagacggcaggggttgttagcagtggtcaattaacaataaaaaaatcaattacaaattttaatgatgatacacttttgatgcctaagacagactatacttttagcgttaatccggatagtgcggctacaggtactgaaagtaatttaccaattaaaccaggtattgctgttaacaatcaagatattaaggtttcttattctaatactgataagacatcaggtaaagaaaaacaagttgttgttgactttatgaaagttacttttcctagcgttggtatttaccgttatgttgttaccgagaataaagggacagcagaaggagttacatatgatgatacaaaatggttagttgacgtctatgttggtaataatgaaaagggaggtcttgaaccaaagtatattgtatctaaaaaaggagattctgctactaaagaaccaatccagtttaataattcattcgaaacaacgtcattaaaaattgaaaaggaagttactggtaatacaggagatcataaaaaagcatttacctttacattaacattgcaaccaaatgaatactatgaggcaagttcggttgtgaaaattgaagagaacggacaaacgaaagatgtgaaaattggggaggcatataagtttactttgaacgatagtcagagtgtgatattgtctaaattaccagttggtattaattataaagttgaagaagcagaagctaatcaaggtggatatactacaacagcaactttaaaagatggagaaaagttatctacttataacttaggtcaggaacataaaacagacaagactgctgatgaaatcgttgtcacaaataaccgtgacactcaagttccaactggtgttgtaggcacccttgctccatttgcagttcttagcattgtggctattggtggagttatctatattacaaaacgtaaaaaagcttaa

SEQ ID NO: 113 - protein, 342 aa, Streptococcus agalactiae
MKKNKLLLATAILATALGTASLNQNVKAETAGVVSSGQLTIKKSITNFNDDTLLMPKTDYTFSVNPDSAATGTESNLPIKPGIAVNNQDIKVSYSNTDKTSGKEKQVVVDFMKVTFPSVGIYRYVVTENKGTAEGVTYDDTKWLVDVYVGNNEKGGLEPKYIVSKKGDSATKEPIQFNNSFETTSLKIEKEVTGNTGDHKKAFTFTLTLQPNEYYEASSVVKIEENGQTKDVKIGEAYKFTLNDSQSVILSKLPVGINYKVEEAEANQGGYTTTATLKDGEKLSTYNLGQEHKTDKTADEIVVTNNRDTQVPTGVVGTLAPFAVLSIVAIGGVIYITKRKKA

SEQ ID NO: 114 - DNA, 726 bp, Streptococcus agalactiae
atgatgatgacaattgtacaggttatcaataaagccattgatactctcattcttatcttttgtttagtcgtactatttttagctggttttggtttgtgggattcttatcatctctatcaacaagcagacgcttctaatttcaaaaaatttaaaacagctcaacaacagcctaaatttgaagacttgttagctttgaatgaggatgtcattggttggttaaatatcccggggactcatattgattatcctctagttcagggaaaaacgaatttagagtatattaataaagcagttgatggcagtgttgccatgtctggtagtttatttttagatacacggaatcataatgattttacggacgattactctctgatttatggccatcatatggcaggtaatgccatgtttggcgaaattccaaaatttttaaaaaaggattttttcaacaaacataataaagctatcattgaaacaaaagagagaaaaaaactaaccgtcactatttttgcttgtctcaagacagatgcctttgaccagttagtttttaatcctaatgctattaccaatcaagaccaacaaaggcagctcgttgattatatcagtaaaagatcaaaacaatttaaacctgttaaattgaagcatcatacaaagttcgttgctttttcaacgtgtgaaaatttttctactgacaatcgtgttatcgttgtcggtactattcaagaataa

SEQ ID NO: 115 - protein, 241 aa, Streptococcus agalactiae
MMMTIVQVINKAIDTLILIFCLVVLFLAGFGLWDSYHLYQQADASNFKKFKTAQQQPKFEDLLALNEDVIGWLNIPGTHIDYPLVQGKTNLEYINKAVDGSVAMSGSLFLDTRNHNDFTDDYSLIYGHHMAGNAMFGEIPKFLKKDFFNKHNKAIIETKERKKLTVTIFACLKTDAFDQLVFNPNAITNQDQQRQLVDYISKRSKQFKPVKLKHHTKFVAFSTCENFSTDNRVIVVGTIQE

SEQ ID NO: 116 - DNA, 560 bp, Streptococcus agalactiae
atgttattttctgtcgtaatgatattaaccatgctggcctttaatcagactgttttagcaaaagacagcactgttcaaactagcattagtgtcgaaaatgtcttagagagagcaggcgatagtaccccattttcgattgcattagaatcaattgatgcgatgaaaacaatagaagaaataacaattgctggttctggaaaagcaagcttttcccctctgaccttcacaacagttgggcaatatacttatcgtgtttatcagaagccttcacaaaataaagattatcaagcagatactactgtatttgacgttcttgtctatgtgacctatgatgaagatgggactctagtcgcaaaagttatttctcgaagggctggagacgaagaaaaatcagcgattacttttaagcccaaacggttagtaaaaccaataccgcctagacaacctaacatccctaaaaccccattaccattagctggtgaagtaaaaagtttattgggtatcttaagtatcgtattactggggttactagttcttctttatgttaaaaaactgaagag

SEQ ID NO: 117 - protein, 189 aa, Streptococcus agalactiae
MLFSVVMILTMLAFNQTVLAKDSTVQTSISVENVLERAGDSTPFSIALESIDAMKTIEEITIAGSGKASFSPLTFTTVGQYTYRVYQKPSQNKDYQADTTVFDVLVYVTYDEDGTLVAKVISRRAGDEEKSAITFKPKRLVKPIPPRQPNIPKTPLPLAGEVKSLLGILSIVLLGLLVLLYVKKLKSKL

SEQ ID NO: 118 - DNA, 1206 bp, Streptococcus agalactiae
atggttatattcgatttaaaacatgtgcaaacattacacagcttgtctcaattacctatttcagtgatgtcacaagataaggcacttattcaagtatatggtaatgacgactatttattatgttactatcaatttttaaagcatctagctattcctcaagctgcacaagatgttattttttatgagggtttatttgaagagtcctttatgatttttcctctttgtcactacattattgccattggacctttctacccttattcacttaataaagactatcaggaacaattagctaataattttttaaaacattcttctcatcgtagcaaagaagagctcttatcctatatggcacttgtcccacattttccaattaataatgtgcggaaccttttgatagctattgacgctttttttgacacacaatttgagacgacttgccaacaaacaattcatcaattgttgcagcattcaaaacagatgactgctgatcctgatatcattcatcgccttaagcatattagcaaagcatctagccaactaccgcctgttttagagcacctaaatcatattatggatctggtaaagctaggcaatccacaattgctcaagcaagaaatcaatcgcatccccttatcaagtatcacctcatcttctatttctgctctaagggcggaaaagaacctcactgttatctatttaactaggttactggaattcagttttgtagaaaatactgacgtagcaaagcattatagccttgtcaaatactacatggccttaaatgaagaagcgagtgacttgctcaaagttttgagaattcgctgtgcagccatcatccatttttccgaatcattaaccaataaaagtatttctgataaacgtcaaatgtacaatagtgtgcttcattatgtcgatagtcacctgtattccaaattaaaggtatctgatatcgctaagcgcctatatgtttccgaatctcacttacgttcagtctttaaaaaatactcaaatgtttccttacaacattatattctaagtacaaaaatcaaagaagctcaactactcttaaaacgaggaattcctgttggagaagtggctaaaagcttatatttttatgacactacccattttcataaaatctttaaaaaatacacgggtatttcttcaaaagactatcttgctaaataccgagataatatttaa

SEQ ID NO: 119 - protein, 401 aa, Streptococcus agalactiae
MVIFDLKHVQTLHSLSQLPISVMSQDKALIQVYGNDDYLLCYYQFLKHLAIPQAAQDVIFYEGLFEESFMIFPLCHYIIAIGPFYPYSLNKDYQEQLANNFLKHSSHRSKEELLSYMALVPHFPINNVRNLLIAIDAFFDTQFETTCQQTIHQLLQHSKQMTADPDIIHRLKHISKASSQLPPVLEHLNHIMDLVKLGNPQLLKQEINRIPLSSITSSSISALRAEKNLTVIYLTRLLEFSFVENTDVAKHYSLVKYYMALNEEASDLLKVLRIRCAAIIHFSESLTNKSISDKRQMYNSVLHYVDSHLYSKLKVSDIAKRLYVSESHLRSVFKKYSNVSLQHYILSTKIKEAQLLLKRGIPVGEVAKSLYFYDTTHFHKIFKKYTGISSKDYLAKYRDNI

SEQ ID NO: 120 - DNA, 3486 bp, Streptococcus agalactiae
atgacacaaaaaaatagctataagttaagcttcctgttatccctaacaggatttattttaggtttattattggtttttataggattgtccggagtatcagtaggacatgcggaaacaagaaatggagcaaacaaacaaggatcttttgaaatcaagaaagtcgaccaaaacaataagcctttaccgggagcaactttttcactgacatcaaaggatggcaagggaacatctgttcaaacgttcacttcaaatgataaaggtattgtagatgctcaaaatctccaaccagggacttataccttaaaagaagaaacagcaccagatggttatgataaaaccagccggacttggacagtgactgtttatgagaacggctataccaagttggttgaaaatccctataatggggaaatcatcagtaaagcagggtcaaaagatgttagtagttctttacagttggaaaatcccaaaatgtcagttgtttctaaatatgggaaaacagaggttagtagtggcgcagcggatttctaccgcaaccatgccgcctattttaaaatgtcttttgagttgaaacaaaaggataaatctgaaacaatcaacccaggtgatacctttgtgttacagctggatagacgtctcaatcctaaaggtatcagtcaagatatccctaaaatcatttacgacagtgcaaatagtccgcttgcgattggaaaataccatgctgagaaccatcaacttatctatactttcacagattatattgcgggtttagataaagtccagttgtctgcagaattgagcttattcctagagaataaggaagtgttggaaaatactagtatctcaaattttaagagtaccataggtgggcaggagatcacctataaaggaacggttaatgttctttatggaaatgagagcactaaagaaagcaattatattactaatggattgagcaatgtgggtgggagtattgaaagctacaacaccgaaacgggagaatttgtctggtatgtttatgtcaatccaaaccgtaccaatattccttatgcgaccatgaatttatggggatttggaagggctcgttcaaatacaagcgacttagaaaacgacgctaatacaagtagtgctgagcttggagagattcaggtctatgaagtacctgaaggagaaaaattaccatcaagttatggggttgatgttacaaaacttactttaagaacggatatcacagcaggcctaggaaatggttttcaaatgaccaaacgtcagcgaattgactttggaaataatatccaaaataaagcatttatcatcaaagtaacagggaaaacagaccaatctggtaagccattggttgttcaatccaatttggcaagttttcgtggtgcttctgaatatgctgcttttactccagttggaggaaatgtctacttccaaaacgaaattgccttgtctccttctaagggtagtggttctgggaaaagtgaatttactaagccctctattacagtagcaaatctaaaacgagtggctcagcttcgctttaagaaaatgtcaactgacaatgtgccattgccagaagcggcttttgagctgcgttcatcaaatggtaatagtcagaaattagaagccagttcaaacacacaaggagaggttcactttaaggacctgacctcgggcacatatgacctgtatgaaacaaaagcgccaaaaggttatcagcaggtgacagagaaattggcgaccgttactgttgatactaccaaacctgctgaggaaatggtcacttggggaagcccacattcgtctgtaaaagtagaagctaacaaagaagtcacgattgtcaaccataaagaaacccttacgttttcagggaagaaaatttgggagaatgacagaccagatcaacgcccagcaaagattcaagtgcaactgttgcaaaatggtcaaaagatgcctaaccagattcaagaagtaacgaaggataacgattggtcttatcacttcaaagacttgcctaagtacgatgccaagaatcaggagtataagtactcagttgaagaagtaaatgttccagacggctacaaggtgtcgtatttaggaaatgatatatttaacaccagagaaacagaatttgtgtttgaacagaataactttaaccttgaatttggaaatgctgaaataaaaggtcaatctgggtcaaaaatcattgatgaagacacgctaacgtctttcaaaggtaagaaaatttggaaaaatgatacggcagaaaatcgtccccaagccattcaagtgcagctttatgctgatggagtggctgtggaaggtcaaaccaaatttatttctggctcaggtaatgagtggtcatttgagtttaaaaacttgaagaagtataatggaacaggtaatgacatcatttactcagttaaagaagtaactgttccaacaggttatgatgtgacttactcagctaatgatattattaataccaaacgtgaggttattacacaacaaggaccgaaactagagattgaagaaacgcttccgctagaatcaggtgcttcaggcggtaccactactgtcgaagactcacgcccagttgataccttatcaggtttatcaagtgagcaaggtcagtccggtgatatgacaattgaagaagatagtgctacccatattaaattctcaaaacgtgatattgacggcaaagagttagctggtgcaactatggagttgcgtgattcatctggtaaaactattagtacatggatttcagatggacaagtgaaagatttctacctgatgccaggaaaatatacatttgtcgaaaccgcagcaccagacggttatgagatagcaactgctattacctttacagttaatgagcaaggtcaggttactgtaaatggcaaagcaactaaaggtgacactcatattgtcatggttgatgcttacaagccaactaagggttcaggtcaggttattgatattgaagaaaagcttccagacgagcaaggtcattctggttcaactactgaaatagaagacagtaaatcttcagaccttatcattggcggtcaaggtgaagttgttgacacaacagaagacacacaaagtggtatgacgggccattctggctcaactactgaaatagaagatagcaagtcttcagacgttatcattggtggtcaggggcaggttgtcgagacaacagaggatacccaaactggcatgtacggggattctggttgtaaaacggaagtcgaagatactaaactagtacaatccttccactttgataacaaggaaccagaaagtaactctgagattcctaaaaaagataagccaaagagtaatactagtttaccagcaactggtgagaagcaacataatatgttcttttggatggttacttcttgctcacttattagtagtgtttttgtaatatcactaaaatccaaaaaacgcctatcatcatgttaa

SEQ ID NO: 121 - protein, 1161 aa, Streptococcus agalactiae
MTQKNSYKLSFLLSLTGFILGLLLVFIGLSGVSVGHAETRNGANKQGSFEIKKVDQNNKPLPGATFSLTSKDGKGTSVQTFTSNDKGIVDAQNLQPGTYTLKEETAPDGYDKTSRTWTVTVYENGYTKLVENPYNGEIISKAGSKDVSSSLQLENPKMSVVSKYGKTEVSSGAADFYRNHAAYFKMSFELKQKDKSETINPGDTFVLQLDRRLNPKGISQDIPKIIYDSANSPLAIGKYHAENHQLIYTFTDYIAGLDKVQLSAELSLFLENKEVLENTSISNFKSTIGGQEITYKGTVNVLYGNESTKESNYITNGLSNVGGSIESYNTETGEFVWYVYVNPNRTNIPYATMNLWGFGRARSNTSDLENDANTSSAELGEIQVYEVPEGEKLPSSYGVDVTKLTLRTDITAGLGNGFQMTKRQRIDFGNNIQNKAFIIKVTGKTDQSGKPLVVQSNLASFRGASEYAAFTPVGGNVYFQNEIALSPSKGSGSGKSEFTKPSITVANLKRVAQLRFKKMSTDNVPLPEAAFELRSSNGNSQKLEASSNTQGEVHFKDLTSGTYDLYETKAPKGYQQVTEKLATVTVDTTKPAEEMVTWGSPHSSVKVEANKEVTIVNHKETLTFSGKKIWENDRPDQRPAKIQVQLLQNGQKMPNQIQEVTKDNDWSYHFKDLPKYDAKNQEYKYSVEEVNVPDGYKVSYLGNDIFNTRETEFVFEQNNFNLEFGNAEIKGQSGSKIIDEDTLTSFKGKKIWKNDTAENRPQAIQVQLYADGVAVEGQTKFISGSGNEWSFEFKNLKKYNGTGNDIIYSVKEVTVPTGYDVTYSANDIINTKREVITQQGPKLEIEETLPLESGASGGTTTVEDSRPVDTLSGLSSEQGQSGDMTIEEDSATHIKFSKRDIDGKELAGATMELRDSSGKTISTWISDGQVKDFYLMPGKYTFVETAAPDGYEIATAITFTVNEQGQVTVNGKATKGDTHIVMVDAYKPTKGSGQVIDIEEKLPDEQGHSGSTTEIEDSKSSDLIIGGQGEVVDTTEDTQSGMTGHSGSTTEIEDSKSSDVIIGGQGQVVETTEDTQTGMYGDSGCKTEVEDTKLVQSFHFDNKEPESNSEIPKKDKPKSNTSLPATGEKQHNMFFWMVTSCSLISSVFVISLKSKKRLSSC

SEQ ID NO: 122 - protein, 5 aa, Artificial
  Sortase substrate motif
  misc_feature (3)..(3): X = any amino acid residue
LPXTG

SEQ ID NO: 123 - protein, 5 aa, Artificial
  sortase substrate motif
FPKTG

SEQ ID NO: 124 - protein, 5 aa, Artificial
  sortase substrate motif
IPKTG

SEQ ID NO: 125 - protein, 2118 aa, Streptococcus agalactiae
TTAAGCTTCCTTTGATTGGCGTCTTTTCATGATAACTACTGCTCCAAGCATAATGCTTAAACCAATAATTGTGAAAAGAATTGTACCAATACCACCTGTTTGTGGGATTGTTACCTTTTTATTTTCTACACGTGTCGCATCTTTTTGGTTGCTGTTAGCAACGTAGTCAATGTTACCACCTGTTATGTATGACCCTTGATTAACTACAAACTTAATATTACCTGCCAACTTAGCAAATCCTGCTGGAGCAAGTGTTTCTTCAAGGTTGTAAGTACCGTCTGCAAGACCTGTAACTTCAAATTGACCTTGATCGTTTGAAGTGTAGGTAATGGCTCTAGCCTTATCTGTTATCCACTCATAAGCTGTACGAGCCTCAATGAAGGCTGCATCGTAATCTGCTTGTTTAGTTTTGATAAGTTCTTTTGCAGTAATTCCTTTTTCACCTTTTTGGTCTGTTGCAGACAACTTGTTATAAGCAGCGATAGCTTCATCTAAAGCTATTTTCTTAGCAGCTAAAGTTTTTTGACCTTCTGATTGATCTGCTTTAAGAGCAAGGTATTTACCTGCTGAGTTTTTCACAACGAATTGTGCACCAGCCAAACGGTCACCTTGTTCATTAGTTTTGACAAATTTCTTACCATGAGTTTCAACTTTTGGTTCAGTTGGGTTCAATGGTGTTGGGTTATCAGAATCTTTGGTATTGGTAATGGTTACTTTACCATTTTCTAGATTTATTGCACTTCCGTAACCAGAAACACGTTCTGAGATCATGTATGATTTGTTTTCTAGACCAGTGAATTTACCCGAGAAGTTACCAGATACTTCAAATTTGATACCATTTCCAAGGTCGATTGTACCTTTAGATGTTTTTGTCAATGATACTGAAGCAACAGTTTTATCTTTATCTTTCAATGTGTAAACAACGTTTACACCATCAGGTGCAATTCCGTCAGACCAAGTTTTAGCAACTGTTACTTCACCCTTTGAAGGTGTAACAGGAAGTTCAGTCAAGTCTTTACCTGGTTTGTTACCATACGACAATTTGATATCATTGGATTCTGGATTATCAATAATTGCTTGACCATTAACAGTAGCACTATAAGTCAATGTAAATTCAATATCAGCTGTTTTAGCTGCTTTTTCCAATTTGCCCAATCCATCAGCTGTGAATTTTAATGTGAAACCACGGGCATCAATGCTAAGTTCATAGTCTGTATCCTTAGCAAAAGTTTCTGTAGTTCCTGAAGCTTTAAGGCTAACAGTTGAACCCATTGTCAAACCATTTGACATTATATCTGTCCAAACCAAGTTTTCGTATTTAGAACCTTTGTGAATTTTTGTTTTAACTTCATAAGGAACAACTTTACCGATTTCAGCAGTAGCAGTTGCTTTGTCACGTGCATAATTACCATAATTTGCGCCAGCTGTCAAAAGTCTATTAACATCTGTCAATGCTGTCAAATCGTTTGTTTTAGCAAAGTTTTTATCAATTTCTGGTTTTTCTTCAGTGTTCTTTGGATAAACATGGGCATCAGCAACAACACCATCTTCATTTACCAATGGAAGAGTGATGTTAACTGGAACCGCTTTTGAAGCAGCCAGGAGGGAACCATTATTGTTGTAAGTAGATTTTGATTTAACTTCAACAATTTTAAACTCGCCTTTCAATCCTTTGGTGTTGAAAACAAGTCCAGTATCTCCCTCTGGTGTCAATCCAGACACGGCCTCATCAATATTTACTGTTATTTCAGGAGTACCATCTTTATTAATTAAGGCTGGTGTTAATTTGTTACCTTCTTTTGCCTTAACATATTGCACTTTACCACTTTTATCTTCTTTCAAAGCTAAAGCAAAGAACGCACCTTCGATTTCTTTAGATCCCTCGCCAAAGTAACCAGCAAGGTCAGAAATAGCTCCACCTTTGTAGTCTTTTCCGTTAAGACCTGTAGTTCCTGGGAAGTTACTTTTGTTAAGATTTGATTCGGTTTGCAAAATCTTGTGCAAAGTCACTGTATTAGTTGTTGCTTCATCCGCAAACGCTGGTGCAACTGAGAGCAATGACGTTAAAGTCAGTAACAATGCCGAGAACATTGCAAAATATTTGTTGATTCTTTTCAT

SEQ ID NO: 126 - protein, 705 aa, Streptococcus agalactiae
MKRINKYFAMFSALLLTLTSLLSVAPAFADEATTNTVTLHKILQTESNLNKSNFPGTTGLNGKDYKGGAISDLAGYFGEGSKEIEGAFFALALKEDKSGKVQYVKAKEGNKLTPALINKDGTPEITVNIDEAVSGLTPEGDTGLVFNTKGLKGEFKIVEVKSKSTYNNNGSLLAASKAVPVNITLPLVNEDGVVADAHVYPKNTEEKPEIDKNFAKTNDLTALTDVNRLLTAGANYGNYARDKATATAEIGKVVPYEVKTKIHKGSKYENLVWTDIMSNGLTMGSTVSLKASGTTETFAKDTDYELSIDARGFTLKFTADGLGKLEKAAKTADIEFTLTYSATVNGQAIIDNPESNDIKLSYGNKPGKDLTELPVTPSKGEVTVAKTWSDGIAPDGVNVVYTLKDKDKTVASVSLTKTSKGTIDLGNGIKFEVSGNFSGKFTGLENKSYMISERVSGYGSAINLENGKVTITNTKDSDNPTPLNPTEPKVETHGKKFVKTNEQGDRLAGAQFVVKNSAGKYLALKADQSEGQKTLAAKKIALDEAIAAYNKLSATDQKGEKGITAKELIKTKQADYDAAFIEARTAYEWITDKARAITYTSNDQGQFEVTGLADGTYNLEETLAPAGFAKLAGNIKFVVNQGSYITGGNIDYVANSNQKDATRVENKKVTIPQTGGIGTILFTIIGLSIMLGAVVIMKRRQSKEA

SEQ ID NO: 127 - DNA, 2025 bp, Streptococcus agalactiae
atgaaaaaaatcaacaaatgtcttacaatgttctcgacactgctattgatcttaacgtcactattctcagttgcaccagcgtttgcggacgacgcaacaactgatactgtgaccttgcacaagattgtcatgccacaagctgcatttgataactttactgaaggtacaaaaggtaagaatgatagcgattatgttggtaaacaaattaatgaccttaaatcttattttggctcaaccgatgctaaagaaatcaagggtgctttctttgttttcaaaaatgaaactggtacaaaattcattactgaaaatggtaaggaagtcgatactttggaagctaaagatgctgaaggtggtgctgttctttcagggttaacaaaagacaatggttttgtttttaacactgctaagttaaaaggaatttaccaaatcgttgaattgaaagaaaaatcaaactacgataacaacggttctatcttggctgattcaaaagcagttccagttaaaatcactctgccattggtaaacaaccaaggtgttgttaaagatgctcacatttatccaaagaatactgaaacaaaaccacaagtagataagaactttgcagataaagatcttgattatactgacaaccgaaaagacaaaggtgttgtctcagcgacagttggtgacaaaaaagaatacatagttggaacaaaaattcttaaaggctcagactataagaaactggtttggactgatagcatgactaaaggtttgacgttcaacaacaacgttaaagtaacattggatggtgaagattttcctgttttaaactacaaactcgtaacagatgaccaaggtttccgtcttgccttgaatgcaacaggtcttgcagcagtagcagcagctgcaaaagacaaagatgttgaaatcaagatcacttactcagctacggtgaacggctccactactgttgaaattccagaaaccaatgatgttaaattggactatggtaataacccaacggaagaaagtgaaccacaagaaggtactccagctaaccaagaaattaaagtcattaaagactgggcagtagatggtacaattactgatgctaatgttgcagttaaagctatctttaccttgcaagaaaaacaaacggatggtacatgggtgaacgttgcttcacacgaagcaacaaaaccatcacgctttgaacatactttcacaggtttggataatgctaaaacttaccgcgttgtcgaacgtgttagcggctacactccagaatacgtatcatttaaaaatggtgttgtgactatcaagaacaacaaaaactcaaatgatccaactccaatcaacccatcagaaccaaaagtggtgacttatggacgtaaatttgtgaaaacaaatcaagctaacactgaacgcttggcaggagctaccttcctcgttaagaaagaaggcaaatacttggcacgtaaagcaggtgcagcaactgctgaagcaaaggcagctgtaaaaactgctaaactagcattggatgaagctgttaaagcttataacgacttgactaaagaaaaacaagaaggccaagaaggtaaaacagcattggctactgttgatcaaaaacaaaaagcttacaatgacgcttttgttaaagctaactactcatatgaatgggttgcagataaaaaggctgataatgttgttaaattgatctctaacgccggtggtcaatttgaaattactggtttggataaaggcacttatggcttggaagaaactcaagcaccagcaggttatgcgacattgtcaggtgatgtaaactttgaagtaactgccacatcatatagcaaaggggctacaactgacatcgcatatgataaaggctctgtaaaaaaagatgcccaacaagttcaaaacaaaaaagtaaccatcccacaaacaggtggtattggtacaattcttttcacaattattggtttaagcattatgcttggagcagtagttatcatgaaaaaacgtcaatcagaggaagcttaa

SEQ ID NO: 128 - protein, 674 aa, Streptococcus agalactiae
MKKINKCLTMFSTLLLILTSLFSVAPAFADDATTDTVTLHKIVMPQAAFDNFTEGTKGKNDSDYVGKQINDLKSYFGSTDAKEIKGAFFVFKNETGTKFITENGKEVDTLEAKDAEGGAVLSGLTKDNGFVFNTAKLKGIYQIVELKEKSNYDNNGSILADSKAVPVKITLPLVNNQGVVKDAHIYPKNTETKPQVDKNFADKDLDYTDNRKDKGVVSATVGDKKEYIVGTKILKGSDYKKLVWTDSMTKGLTFNNNVKVTLDGEDFPVLNYKLVTDDQGFRLALNATGLAAVAAAAKDKDVEIKITYSATVNGSTTVEIPETNDVKLDYGNNPTEESEPQEGTPANQEIKVIKDWAVDGTITDANVAVKAIFTLQEKQTDGTWVNVASHEATKPSRFEHTFTGLDNAKTYRVVERVSGYTPEYVSFKNGVVTIKNNKNSNDPTPINPSEPKVVTYGRKFVKTNQANTERLAGATFLVKKEGKYLARKAGAATAEAKAAVKTAKLALDEAVKAYNDLTKEKQEGQEGKTALATVDQKQKAYNDAFVKANYSYEWVADKKADNVVKLISNAGGQFEITGLDKGTYGLEETQAPAGYATLSGDVNFEVTATSYSKGATTDIAYDKGSVKKDAQQVQNKKVTIPQTGGIGTILFTIIGLSIMLGAVVIMKKRQSEEA

SEQ ID NO: 129 - protein, 5 aa, Artificial
  sortase substrate motif
IPQTG

SEQ ID NO: 130 - protein, 5 aa, Artificial
  sortase substrate motif
LPKTG

SEQ ID NO: 131 - protein, 5 aa, Artificial
  sortase substrate motif
LPSTG

SEQ ID NO: 132 - protein, 5 aa, Artificial
  sortase substrate motif
LPFTG

SEQ ID NO: 133 - protein, 5 aa, Artificial
  sortase substrate motif
  misc_feature (3)..(3): X = any amino acid residue
IPXTG

SEQ ID NO: 134 - protein, 5 aa, Artificial
  sortase substrate motif
  misc_feature (3)..(3): X = any amino acid residue
LPXSG

SEQ ID NO: 135 - protein, 5 aa, Artificial
  sortase substrate motif
  misc_feature (3)..(3): X = any amino acid residue
VVXTG

SEQ ID NO: 136 - protein, 5 aa, Artificial
  sortase substrate motif
  misc_feature (3)..(3): X = any amino acid residue
EVXTG

SEQ ID NO: 137 - protein, 5 aa, Artificial
  sortase substrate motif
  misc_feature (3)..(3): X = any amino acid residue
VPXTG

SEQ ID NO: 138 - protein, 5 aa, Artificial
  sortase substrate motif
  misc_feature (3)..(3): X = any amino acid residue
QVXTG

SEQ ID NO: 139 - protein, 5 aa, Artificial
  sortase substrate motif
  misc_feature (3)..(3): X = any amino acid residue
LPXAG

SEQ ID NO: 140 - protein, 5 aa, Artificial
  sortase substrate motif
QVPTG

SEQ ID NO: 141 - protein, 5 aa, Artificial
  sortase substrate motif
  misc_feature (3)..(3): X = any amino acid residue
FPXTG

SEQ ID NO: 142 - protein, 5 aa, Artificial
  sortase substrate motif
NPQTN

SEQ ID NO: 143 - protein, 6 aa, Artificial
  substrate sortase motif
  misc_feature (1)..(3): X = any amino acid residue
XPXTGG

SEQ ID NO: 144 - protein, 6 aa, Artificial
  sortase substrate motif
  misc_feature (1)..(6): X = any amino acid residue
LPXTAX

SEQ ID NO: 145 - protein, 6 aa, Artificial
  sortase substrate motif
  misc_feature (1)..(6): X = any amino acid residue
LAXTGX

SEQ ID NO: 146 - protein, 15 aa, Artificial
  pilin motif
  misc_feature (1)..(15): X = any amino acid residue
YPKNXXXXXXXXXXK

SEQ ID NO: 147 - protein, 14 aa, Artificial
  pilin motif
  misc_feature (1)..(14): X = any amino acid residue
YPKNXXXXXXXXXK

SEQ ID NO: 148 - protein, 11 aa, Artificial
  pilin motif
  misc_feature (1)..(11): X = any amino acid residue
YPKXXXXXXXK

SEQ ID NO: 149 - protein, 15 aa, Artificial
  pilin motif
  misc_feature (1)..(15): X = any amino acid residue
YPKXXXXXXXXXXXK

SEQ ID NO: 150 - protein, 13 aa, Artificial
  pilin motif
  misc_feature (1)..(13): X = any amino acid residue
PKNXXXXXXXXXK

SEQ ID NO: 151 - protein, 10 aa, Artificial
  pilin motif
  misc_feature (1)..(10): X = any amino acid residue
WXXXVXVYPK

SEQ ID NO: 152 - protein, 12 aa, Artificial
  E box motif
  misc_feature (1)..(12): X = any amino acid residue
YXLXETXAPXGY

SEQ ID NO: 153 - protein, 12 aa, Artificial
  E box motif
  misc_feature (1)..(12): X = any amino acid residue
YXLXEXXXXXGY

SEQ ID NO: 154 - protein, 12 aa, Artificial
  E box motif
  misc_feature (1)..(12): X = any amino acid residue
YXLXEXXXPXGY

SEQ ID NO: 155 - protein, 12 aa, Artificial
  E box motif
YKLKETKAPEGY

SEQ ID NO: 156 - protein, 12 aa, Artificial
  E box motif
YVLKEIETQSGY

SEQ ID NO: 157 - protein, 12 aa, Artificial
  E box motif
YKLYEISSPDGY

SEQ ID NO: 158 - protein, 13 aa, Artificial
  pilin motif
  misc_feature (1)..(13): X = any amino acid residue
YPKNXXXXXXXXK

SEQ ID NO: 159 - protein, 11 aa, artificial
  pilin motif
  misc_feature (1)..(11): X = any amino acid residue
PKXXXXXXXXK

SEQ ID NO: 160 - protein, 13 aa, Artificial
  pilin motif
  misc_feature (1)..(13): X = any amino acid residue
YPKXXXXXXXXXK

SEQ ID NO: 161 - protein, 12 aa, Artificial
  pilin motif
  misc_feature (1)..(12): X = any amino acid residue
PKNXXXXXXXXK

SEQ ID NO: 162 - protein, 13 aa, Artificial
  pilin motif
  misc_feature (1)..(13): X = any amino acid residue
PKXXXXXXXXXXK

SEQ ID NO: 163 - protein, 11 aa, Artificial
  E box motif
  misc_feature (1)..(11): X = any amino acid residue
YXLXETXAPXG

SEQ ID NO: 164 - protein, 12 aa, Artificial
  E box motif
  misc_feature (1)..(12): X = any amino acid residue
YXXXEXXAXXGY

SEQ ID NO: 165 - protein, 12 aa, Artificial
  E box motif
  misc_feature (1)..(12): X = any amino acid residue
YXLXEXXXPXDY

SEQ ID NO: 166 - protein, 5 aa, Artificial
  sortase substrate motif
LPSTG

SEQ ID NO: 167 - protein, 5 aa, Artificial
  sortase substrate motif
  misc_feature (2)..(2): X = P or V
VXPTG

SEQ ID NO: 168 - protein, 5 aa, Artificial
  sortase substrate motif
NPKTN

SEQ ID NO: 169 - protein, 5 aa, Artificial
  sortase substrate motif
NPQTG

SEQ ID NO: 170 - protein, 5 aa, Artificial
  sortase substrate motif
NPKTG

SEQ ID NO: 171 - protein, 420 aa, Streptococcus pneumoniae
MEHINHTTLLIGIKDKNITLNKAIQHDTHIEVFATLDYHPPKCKHCKGKQIKYDFQKPSKIPFIEIGGFPSLIHLKKRRFQCKSCRKVTVAETTLVQKNCQISEMVRQKIAQLLLNREALTHIASKLAISTSTSTVYRKLKQFHFQEDYTTLPEILSWDEFSYQKGKLAFIAQDFNTKKIMTILDNRRQTTIRNHFFKYSKEARKKVKVVTVDMSGSYIPLIKKLFPNAKIVLDRFHIVQHMSRALNQTRINIMKQFDDKSLEYRALKYYWKFILKDSRKLSLKPFYARTFRETLTPRECLKKIFTLVPELKDYYDLYQLLLFHLQEKNTDQFWGLIQDTLPHLNRTFKTTLSTFICYKNYITNAIELPYSNAKLEATNKLIKDIKRNAFGFRNFENFKKRIFIALNIKKERTKFVLSRA

SEQ ID NO: 172 - protein, 509 aa, Streptococcus pneumoniae; identical to SEQ ID NO: 87

SEQ ID NO: 173 - protein, 890 aa, Streptococcus pneumoniae
MLNRETHMKKVRKIFQKAVAGLCCISQLTAFSSIVALAETPETSPAIGKVVIKETGEGGALLGDAVFELKNNTDGTTVSQRTEAQTGEAIFSNIKPGTYTLTEAQPPVGYKPSTKQWTVEVEKNGRTTVQGEQVENREEALSDQYPQTGTYPDVQTPYQIIKVDGSEKNGQHKALNPNPYERVIPEGTLSKRIYQVNNLDDNQYGIELTVSGKTTVETKEASTPLDVVILLDNSNSMSNIRHNHAHRAEKAGEATRALVDKITSNPDNRVALVTYGSTIFDGSEATVEKGVADANGKILNDSALWTFDRTTFTAKTYNYSFLNLTSDPTDIQTIKDRIPSDAEELNKDKLMYQFGATFTQKALMTADDILTKQARPNSKKVIFHITDGVPTMSYPINFKYTGTTQSYRTQLNNFKAKTPNSSGILLEDFVTWSADGEHKIVRGDGESYQMFTKKPVTDQYGVHQILSITSMEQRAKLVSAGYRFYGTDLYLYWRDSILAYPFNSSTDWITNHGDPTTWYYNGNMAQDGYDVFTVGVGVNGDPGTDEATATRFMQSISSSPDNYTNVADPSQILQELNRYFYTIVNEKKSIENGTITDPMGELIDFQLGADGRFDPADYTLTANDGSSLVNNVPTGGPQNDGGLLKNAKVFYDTTEKRIRVTGLYLGTGEKVTLTYNVRLNDQFVSNKFYDTNGRTTLHPKEVEKNTVRDFPIPKIRDVRKYPEITIPKEKKLGEIEFIKINKNDKKPLRDAVFSLQKQHPDYPDIYGAIDQNGTYQNVRTGEDGKLTFKNLSDGKYRLFENSEPAGYKPVQNKPIVAFQIVNGEVRDVTSIVPQDIPAGYEFTNDKHYITNEPIPPKREYPRTGGIGMLPFYLIGCMMMGGVLLYTRKHP

SEQ ID NO: 174 - protein, 644 aa, Streptococcus pneumoniae
MKSINKFLTMLAALLLTASSLFSAATVFAADNVSTAPDAVTKTLTIHKLLLSEDDLKTWDTNGPKGYDGTQSSLKDLTGVVAEEIPNVYFELQKYNLTDGKEKENLKDDSKWTTVHGGLTTKDGLKIETSTLKGVYRIREDRTKTTYVGPNGQVLTGSKAVPALVTLPLVNNNGTVIDAHVFPKNSYNKPVVDKRIADTLNYNDQNGLSIGTKIPYVVNTTIPSNATFATSFWSDEMTEGLTYNEDVTITLNNVAMDQADYEVTKGNNGFNLKLTEAGLAKINGKDADQKIQITYSATLNSLAVADIPESNDITYHYGNHQDHGNTPKPTKPNNGQITVTKTWDSQPAPEGVKATVQLVNAKTGEKVGAPVELSENNWTYTWSGLDNSIEYKVEEEYNGYSAEYTVESKGKLGVKNWKDNNPAPINPEEPRVKTYGKKFVKVDQKDTRLENAQFVVKKADSNKYIAFKSTAQQAADEKAAATAKQKLDAAVAAYTNAADKQAAQALVDQAQQEYNVAYKEAKFGYVEVAGKDEAMVLTSNTDGQFQISGLAAGTYKLEEIKAPEGFAKIDDVEFVVGAGSWNQGEFNYLKDVQKNDATKVVNKKITIPQTGGIGTIIFAVAGAAIMGIAVYAYVKNNKDEDQLA

SEQ ID NO: 175 - protein, 401 aa, Streptococcus pneumoniae
MTMQKMQKMISRIFFVMALCFSLVWGAHAVQAQEDHTLVLQLENYQEVVSQLPSRDGHRLQVWKLDDSYSYDDRVQIVRDLHSWDENKLSSFKKTSFEMTFLENQIEVSHIPNGLYYVRSIIQTDAVSYPAEFLFEMTDQTVEPLVIVAKKTDTMTTKVKLIKVDQDHNRLEGVGFKLVSVARDGSEKEVPLIGEYRYSSSGQVGRTLYTDKNGEIFVTNLPLGNYRFKEVEPLAGYAVTTLDTDVQLVDHQLVTITVVNQKLPRGNVDFMKVDGRTNTSLQGAMFKVMKEESGHYTPVLQNGKEVVVTSGKDGRFRVEGLEYGTYYLWELQAPTGYVQLTSPVSFTIGKDTRKELVTVVKNNKRPRIDVPDTGEETLYILMLVAILLFGSGYYLTKKPNN

SEQ ID NO: 176 - protein, 304 aa, Streptococcus pneumoniae
MLIKMVKTKKQKRNNLLLGVVFFIGMAVMAYPLVSRLYYRVESNQQIADFDKEKATLDEADIDERMKLAQAFNDSLNNVVSGDPWSEEMKKKGRAEYARMLEIHERMGHVEIPVIDVDLPVYAGTAEEVLQQGAGHLEGTSLPIGGNSTHAVITAHTGLPTAKMFTDLTKLKVGDKFYVHNIKEVMAYQVDQVKVIEPTNFDDLLIVPGHDYVTLLTCTPYMINTHRLLVRGHRIPYVAEVEEEFIAANKLSHLYRYLFYVAVGLIVILLWIIRRLRKKKKQPEKALKALKAARKEVKVEDGQQ

SEQ ID NO: 177 - protein, 261 aa, Streptococcus pneumoniae
VSRYYYRIESNEVIKEFDETVSQMDKAELEERWRLAQAFNATLKPSEILDPFTEQEKKKGVSEYANMLKVHERIGYVEIPAIDQEIPMYVGTSEEILQKGAGLLEGASLPVGGENTHTVVTAHRGLPTAELFSQLDKMKKGDVFYLHVLDQVLAYQVDQILTVEPNDFEPVLIQHGEDYATLLTCTPYMINSHRLLVRGKRIPYTAPIAERNRAVRERGQFWLWLLLAALVMILVLSYGVYRHRRIVKGLEKQLEEHHVKG

SEQ ID NO: 178 - protein, 283 aa, Streptococcus pneumoniae
MSKAKLQKLLGYLLMLVALVIPVYCFGQMVLQSLGQVKGHEIFSESVTADSYQEQLQRSLDYNQRLDSQNRIVDPFLAEGYEVNYQVSDDPDAVYGYLSIPSLEIMEPVYLGADYHHLAMGLAHVDGTPLPVEGKGIRSVIAGHRAEPSHVFFRHLDQLKVGDALYYDNGQEIVEYQMMDTEIILPSEWEKLESVSSKNIMTLITCDPIPTFNKRLLVNFERVAVYQKSDPQTAAVARVAFTKEGQSVSRVATSQWLYRGLVVLAFLGILFVLWKLARLLRGK

SEQ ID NO: 179 - DNA, 869 bp, Streptococcus agalactiae
gctacaacagttcacggggagactgttgtaaacggagccaaactaacagttacaaaaaaccttgatttagttaatagcaatgcattaattccaaatacagattttacatttaaaatcgaacctgatactactgtcaacgaagacggaaataagtttaaaggtgtagctttgaacacaccgatgactaaagtcacttacaccaattcagataaaggtggatcaaatacgaaaactgcagaatttgatttttcagaagttacttttgaaaaaccaggtgtttattattacaaagtaactgaggagaagatagataaagttcctggtgtttcttatgatacaacatcttacactgttcaagttcatgtcttgtggaatgaagagcaacaaaaaccagtagctacttatattgttggttataaagaaggtagtaaggtgccaattcagttcaaaaatagcttagattctactacattaacggtgaagaaaaaagtttcaggtaccggtggagatcgctctaaagattttaattttggtctgactttaaaagcaaatcagtattataaggcgtcagaaaaagtcatgattgagaagacaactaaaggtggtcaagctcctgttcaaacagaggctagtatagatcaactctatcattttaccttgaaagatggtgaatcaatcaaagtcacaaatcttccagtaggtgtggattatgttgtcactgaagacgattacaaatcagaaaaatatacaaccaacgtggaagttagtcctcaagatggagctgtaaaaaatatcgcaggtaattcaactgaacaagagacatctactgataaagatatgaccattacttttacaaataaaaaagattt

SEQ ID NO: 180 - protein, 5 aa, Artificial
  sortase substrate motif
LPATG

SEQ ID NO: 181 - protein, 5 aa, Artificial
  sortase substrate motif
LPSSG

SEQ ID NO: 182 - protein, 5 aa, Artificial
  sortase substrate motif
VVPTG

SEQ ID NO: 183 - protein, 5 aa, Artificial
  sortase substrate motif
EVPTG

SEQ ID NO: 184 - protein, 5 aa, Artificial
  sortase substrate motif
VPPTG

SEQ ID NO: 185 - protein, 5 aa, Artificial
  sortase substrate motif
LPLAG

SEQ ID NO: 186 - protein, 5 aa, Artificial
  sortase substrate motif
  misc_feature (3)..(3): X = any amino acid residue
YPXTG

SEQ ID NO: 187 - protein, 509 aa, Streptococcus pneumoniae; identical to SEQ ID NO: 87

SEQ ID NO: 188 - protein, 883 aa, Streptococcus pneumoniae
MKKVRKIFQKAVAGLCCISQLTAFSSIVALAETPETSPAIGKVVIKETGEGGALLGDAVFELKNNTDGTTVSQRTEAQTGEAIFSNIKPGTYTLTEAQPPVGYKPSTKQWTVEVEKNGRTTVQGEQVENREEALSDQYPQTGTYPDVQTPYQIIKVDGSEKNGQHKALNPNPYERVIPEGTLSKRIYQVNNLDDNQYGIELTVSGKTTVETKEASTPLDVVILLDNSNSMSNIRHNHAHRAEKAGEATRALVDKITSNPDNRVALVTYGSTIFDGSEATVEKGVADANGKILNDSALWTFDRTTFTAKTYNYSFLNLTSDPTDIQTIKDRIPSDAEELNKDKLMYQFGATFTQKALMTADDILTKQARPNSKKVIFHITDGVPTMSYPINFKYTGTTQSYRTQLNNFKAKTPNSSGILLEDFVTWSADGEHKIVRGDGESYQMFTKKPVTDQYGVHQILSITSMEQRAKLVSAGYRFYGTDLYLYWRDSILAYPFNSSTDWITNHGDPTTWYYNGNMAQDGYDVFTVGVGVNGDPGTDEATATRFMQSISSSPDNYTNVADPSQILQELNRYFYTIVNEKKSIENGTITDPMGELIDFQLGADGRFDPADYTLTANDGSSLVNNVPTGGPQNDGGLLKNAKVFYDTTEKRIRVTGLYLGTGEKVTLTYNVRLNDQFVSNKFYDTNGRTTLHPKEVEKNTVRDFPIPKIRDVRKYPEITIPKEKKLGEIEFIKINKNDKKPLRDAVFSLQKQHPDYPDIYGAIDQNGTYQNVRTGEDGKLTFKNLSDGKYRLFENSEPAGYKPVQNKPIVAFQIVNGEVRDVTSIVPQDIPAGYEFTNDKHYITNEPIPPKREYPRTGGIGMLPFYLIGCMMMGGVLLYTRKNP

SEQ ID NO: 189 - protein, 644 aa, Streptococcus pneumoniae
  misc_feature (267)..(267): Xaa can be any naturally occurring amino acid
MKSINKFLTMLAALLLTASSLFSAATVFAADNVSTAPDAVTKTLTIHKLLLSEDDLKTWDTNGPKGYDGTQSSLKDLTGVVAEEIPNVYFELQKYNLTDGKEKENLKDDSKWTTVHGGLTTKDGLKIETSTLKGVYRIREDRTKTTYVGPNGQVLTGSKAVPALVTLPLVNNNGTVIDAHVFPKNSYNKPVVDKRIADTLNYNDQNGLSIGTKIPYVVNTTIPSNATFATSFWSDEMTEGLTYNEDVTITLNNVAMDQADYEVTKGXNGFNLKLTEAGLAKINGKDADQKIQITYSATLNSLAVADIPESNDITYHYGNHQDHGNTPKPTKPNNGQITVTKTWDSQPAPEGVKATVQLVNAKTGEKVGAPVELSENNWTYTWSGLDNSIEYKVEEEYNGYSAEYTVESKGKLGVKNWKDNNPAPINPEEPRVKTYGKKFVKVDQKDTRLENAQFVVKKADSNKYIAFKSTAQQAADEKAAATAKQKLDAAVAAYTNAADKQAAQALVDQAQQEYNVAYKEAKFGYVEVAGKDEAMVLTSNTDGQFQISGLAAGTYKLEEIKAPEGFAKIDDVEFVVGAGSWNQGEFNYLKDVQKNDATKVVNKKITIPQTGGIGTIIFAVAGAAIMGIAVYAYVKNNKDEDQLA

SEQ ID NO: 190 - protein, 401 aa, Streptococcus pneumoniae; identical to SEQ ID NO: 175

SEQ ID NO: 191 - protein, 304 aa, Streptococcus pneumoniae; identical to SEQ ID NO: 176

SEQ ID NO: 192 - protein, 297 aa, Streptococcus pneumoniae
MDNSRRSRKKGTKKKKHPLILLLIFLVGFAVAIYPLVSRYYYRIESNEVIKEFDETVSQMDKAELEERWRLAQAFNATLKPSEILDPFTEQEKKKGVSEYANMLKVHERIGYVEIPAIDQEIPMYVGTSEEILQKGAGLLEGASLPVGGENTHTVVTAHRGLPTAELFSQLDKMKKGDVFYLHVLDQVLAYQVDQILTVEPNDFEPVLIQHGEDYATLLTCTPYMINSHRLLVRGKRIPYTAPIAERNRAVRERGQFWLWLLLAALVMILVLSYGVYRHRRIVKGLEKQLEEHHVKG

SEQ ID NO: 193 - protein, 283 aa, Streptococcus pneumoniae
MSKAKLQKLLGYLLMLVALVIPVYCFGQMVLQSLGQVKGHEIFSESVTADSYQEQLQRSLDYNQRLDSQNRIVDPFLAEGYEVNYQVSDDPDAVYGYLSIPSLEIMEPVYLGADYHHLAMGLAHVDGTPLPVEGKGIRSVIAGHRAEPSHVFFRHLDQLKVGDALYYDNGQEIVEYQMMDTEIILPSEWEKLESVSSKNIMTLITCDPIPTFNKRLLVNFERVAVYQKSDPQTAAVARVAFTKEGQSVSRVATSQWLYRGLVVLAFMGILFVLWKLARLLRGK

SEQ ID NO: 194 - protein, 509 aa, Streptococcus pneumoniae; identical to SEQ ID NO: 87

SEQ ID NO: 195 - protein, 883 aa, Streptococcus pneumoniae
MKKVRKIFQKAVAGLCCISQLTAFSSIVALAETPETSPAIGKVVIKETGEGGALLGDAVFELKNNTDGTTVSQRTEAQTGEAIFSNIKPGTYTLTEAQPPVGYKPSTKQWTVEVEKNGRTTVQGEQVENREEALSDQYPQTGTYPDVQTPYQIIKVDGSEKNGQHKALNPNPYERVIPEGTLSKRIYQVNNLDDNQYGIELTVSGKTTVETKEASTPLDVVILLDNSNSMSNIRHNHAHRAEKAGEATRALVDKITSNPDNRVALVTYGSTIFDGSEATVEKGVADANGKILNDSALWTFDRTTFTAKTYNYSFLNLTSDPTDIQTIKDRIPSDAEELNKDKLMYQFGATFTQKALMTADDILTKQARPNSKKVIFHITDGVPTMSYPINFKYTGTTQSYRTQLNNFKAKTPNSSGILLEDFVTWSADGEHKIVRGDGESYQMFTKKPVTDQYGVHQILSITSMEQRAKLVSAGYRFYGTDLYLYWRDSILAYPFNSSTDWITNHGDPTTWYYNGNMAQDGYDVFTVGVGVNGDPGTDEATATRFMQSISSSPDNYTNVADPSQILQELNRYFYTIVNEKKSIENGTITDPMGELIDFQLGADGRFDPADYTLTANDGSSLVNNVPTGGPQNDGGLLKNAKVFYDTTEKRIRVTGLYLGTGEKVTLTYNVRLNDQFVSNKFYDTNGRTTLHPKEVEKNTVRDFPIPKIRDVRKYPEITIPKEKKLGEIEFIKINKNDKKPLRDAVFSLQKQHPDYPDIYGAIDQNGTYQNVRTGEDGKLTFKNLSDGKYRLFENSEPAGYKPVQNKPIVAFQIVNGEVRDVTSIVPQDIPAGYEFTNDKHYITNEPIPPKREYPRTGGIGMLPFYLIGCMMMGGVLLYTRKHP

SEQ ID NO: 196 - protein, 644 aa, Streptococcus pneumoniae; identical to SEQ ID NO: 174

SEQ ID NO: 197 - protein, 401 aa, Streptococcus pneumoniae; identical to SEQ ID NO: 175

SEQ ID NO: 198 - protein, 304 aa, Streptococcus pneumoniae; identical to SEQ ID NO: 176

SEQ ID NO: 199 - protein, 297 aa, Streptococcus pneumoniae; identical to SEQ ID NO: 192

SEQ ID NO: 200 - protein, 283 aa, Streptococcus pneumoniae; identical to SEQ ID NO: 178

SEQ ID NO: 201 - protein, 509 aa, Streptococcus pneumoniae; identical to SEQ ID NO: 87

SEQ ID NO: 202 - protein, 883 aa, Streptococcus pneumoniae; identical to SEQ ID NO: 195

SEQ ID NO: 203 - protein, 644 aa, Streptococcus pneumoniae; identical to SEQ ID NO: 174

SEQ ID NO: 204 - protein, 401 aa, Streptococcus pneumoniae; identical to SEQ ID NO: 175

SEQ ID NO: 205 - protein, 304 aa, Streptococcus pneumoniae; identical to SEQ ID NO: 176

SEQ ID NO: 206 - protein, 297 aa, Streptococcus pneumoniae; identical to SEQ ID NO: 192

SEQ ID NO: 207 - protein, 283 aa, Streptococcus pneumoniae; identical to SEQ ID NO: 178

SEQ ID NO: 208 - protein, 509 aa, Streptococcus pneumoniae; identical to SEQ ID NO: 87

SEQ ID NO: 209 - protein, 886 aa, Streptococcus pneumoniae
MKKVRKIFQKAVAGLCCISQLTAFSSIVALAETPETSPAIGKVVIKETGEGGALLGDAVFELKNNTNGTTVSQRTEAQTGEAIFSNIKPGTYTLTEAQPPVGYKPSTKQRTVEVEKNGRTTVQGEQVENREEALSDQYPQTGTYPDVQTPYQIIKVDGSEKNGQHKALNPNPYERVIPEGTLSKRIYQVNNLDDNQYGIELTVSGKTVYERKDKSVPLDVVILLDNSNSMSNIRNKNARRAERAGEATRSLIDKITSDPENRVALVTYASTIFDGTEFTVEKGVADKNGKRLNDSLFWNYDQTSFTTNTKDYSYLKLTNDKNDIVELKNKVPTEAEDHDGNRLMYQFGATFTQKALMKADEILTQQARQNSQKVIFHITDGVPTMSYPINFNHATFAPSYQNQLNAFFSKSPNKDGILLSDFITQATSGEHTIVRGDGQSYQMFTDKTVYEKGAPAAFPVKPEKYSEMKAVGYAVIGDPINGGYIWLNWRESILAYPFNSNTAKITNHGDPTRWYYNGNIAPDGYDVFTVGIGINGDPGTDEATATSFMQSISSKPENYTNVTDTTKILEQLNRYFHTIVTEKKSIENGTITDPMGELIDLQLGTDGRFDPADYTLTANDGSRLENGQAVGGPQNDGGLLKNAKVFYDTTEKRIRVTGLYLGTGEKVTLTYNVRLNDQFVSNKFYDTNGRTTLHPKEVEKNTVRDFPIPKIRDVRKYPAITIAKEKKLGEIEFIKINKNDKKPLRDAVFSLQKQHPDYPDIYGAIDQNGTYQNVRTGEDGKLTFKNLSDGKYRLFENSEPAGYKPVQNKPIVAFQIVNGEVRDVTSIVPQDIPAGYEFTNDKHYITNEPIPPKREYPRTGGIGMLLFYLIGCMMMGGVLLYTRKHP

SEQ ID NO: 210 - protein, 665 aa, Streptococcus pneumoniae
MKSINKFLTMLAALLLTASSLFSAATVFAAGTTTTSVTVHKLLATDGDMDKIANELETGNYAGNKVGVLPANAKEIAGVMFVWTNTNNEIIDENGQTLGVNIDPQTFKLSGAMPATAMKKLTEAEGAKFNTANLPAAKYKIYEIHSLSTYVGEDGATLTGSKAVPIEIELPLNDVVDAHVYPKNTEAKPKIDKDFKGKANPDTPRVDKDTPVNHQVGDVVEYEIVTKIPALANYATANWSDRMTEGLAFNKGTVKVTVDDVALEAGDYALTEVATGFDLKLTDAGLAKVNDQNAEKTVKITYSATLNDKAIVEVPESNDVTFNYGNNPDHGNTPKPNKPNENGDLTLTKTWVDATGAPIPAGAEATFDLVNAQTGKVVQTVTLTTDKNTVTVNGLDKNTEYKFVERSIKGYSADYQEITTAGEIAVKNWKDENPKPLDPTEPKVVTYGKKFVKVNDKDNRLAGAEFVIANADNAGQYLARKADKVSQEEKQLVVTTKDALDRAVAAYNALTAQQQTQQEKEKVDKAQAAYNAAVIAANNAFEWVADKDNENVVKLVSDAQGRFEITGLLAGTYYLEETKQPAGYALLTSRQKFEVTATSYSATGQGIEYTAGSGKDDATKVVNKKITIPQTGGIGTIIFAVAGAVIMGIAVYAYVKNNKDEDQLA

SEQ ID NO: 211 - protein, 413 aa, Streptococcus pneumoniae
MTMQKMQKMQKMQKMQKMQKMISRIFFVMALCFSLVWGAHAVQAQEDHTLVLQLENYQEVVSQLPSRDGHRLQVWKLDDSYSYDNRVQIVRDLHSWDENKLSSFKKTSFEMTFLENQIEVSHIPNGLYYVRSIIQTDAVSYPAEFLFEMTDQTVEPLVIVAKKADTVTTKVKLIKVDQDHNRLEGVGFKLVSVARDGSEKEVPLIGEYRYSSSGQVGRTLYTDKNGEIVVTNLPLGTYRFKEVEPLAGYTVTTMDTDVQLVDHQLVTITVVNQKLPRGNVDFMKVDGRTNTSLQGAMFKVMKEENGHYTPVLQNGKEVVVASGKDGRFRVEGLEYGTYYLWELQAPTGYVQLTSPVSFTIGKDTRKELVTVVKNNKRPRIDVPDTGEETLYILMLVAILLFGSGYYLTKKTNN

SEQ ID NO: 212 - protein, 302 aa, Streptococcus pneumoniae
MLIKMAKTKKQKRNNLLLGVVFFIGIAVMAYPLVSRLYYRVESNQQIADFDKEKATLDEADIDERMKLAQAFNDSLNNVVSGDPWSEEMKKKGRAEYARMLEIHERMGHVEIPAIDVDLPVYAGTAEEVLQQGAGHLEGTSLPIGGNSTHAVITAHTGLPTAKMFTDLTKLKVGDKFYVHNIKEVMAYQVDQVKVIEPTNFDDLLIVPGHDYVTLLTCTPYMINTHRLLVRGHRIPYVAEVEEEFIAANKLSHLYRYLFYVAVGLIVILLWIIRRLRKKKRQSERALKALKEATKEVKVEDE

SEQ ID NO: 213 - protein, 297 aa, Streptococcus pneumoniae
MSKSRYSRKKSVKKKKNPFILLLIFLVGLAVAMYPLVSRYYYRIESNEVIKEFDETVSQMDKAELEERWRLAQAFNATLKPSEILDPFTEQEKKKGVSEYANMLKVHERIGYVEIPAIDQEIPMYVGTSEEILQKGAGLLEGASLPVGGENTHTVVTAHRGLPTAELFSQLDKMKKGDIFYLHVLDQVLAYQVDQIVTVEPNDFEPVLIQHGEDYATLLTCTPYMINSHRLLVRGKRIPYTAPIAERNRAVRERGQFWLWLLLGAMAVILLLLYRVYRNRRIVKGLEKQLEGRHVKD

SEQ ID NO: 214 - protein, 283 aa, Streptococcus pneumoniae; identical to SEQ ID NO: 80

SEQ ID NO: 215 - protein, 509 aa, Streptococcus pneumoniae; identical to SEQ ID NO: 87

SEQ ID NO: 216 - protein, 883 aa, Streptococcus pneumoniae; identical to SEQ ID NO: 195

SEQ ID NO: 217 - protein, 644 aa, Streptococcus pneumoniae; identical to SEQ ID NO: 174

SEQ ID NO: 218 - protein, 401 aa, Streptococcus pneumoniae; identical to SEQ ID NO: 175

SEQ ID NO: 219 - protein, 304 aa, Streptococcus pneumoniae; identical to SEQ ID NO: 176

SEQ ID NO: 220 - protein, 297 aa, Streptococcus pneumoniae; identical to SEQ ID NO: 192

SEQ ID NO: 221 - protein, 283 aa, Streptococcus pneumoniae; identical to SEQ ID NO: 178

SEQ ID NO: 222 - protein, 509 aa, Streptococcus pneumoniae; identical to SEQ ID NO: 87

SEQ ID NO: 223 - protein, 886 aa, Streptococcus pneumoniae
MKKVRKIFQKAVAGLCCISQLTAFSSIVALAETPETSPAIGKVVIKETGEGGALLGDAVFELKNNTDGTTVSQRTEAQTGEAIFSNIKPGTYTLTEAQPPVGYKPSTKQWTVEVEKNGRTTVQGEQVENREEALSDQYPQTGTYPDVQTPYQIIKVDGSEKNGQHKALNPNPYERVIPEGTLSKRIYQVNNLDDNQYGIELTVSGKTVYERKDKSVPLDVVILLDNSNSMSNIRNKNARRAERAGEATRSLIDKITSDPENRVALVTYASTIFDGTEFTVEKGVADKNGKRLNDSLFWNYDQTSFTTNTKDYSYLKLTNDKNDIVELKNKVPTEAEDHDGNRLMYQFGATFTQKALMKADEILTQQARQNSQKVIFHITDGVPTMSYPINFNHATFAPSYQNQLNAFFSKSPNKDGILLSDFITQATSGEHTIVRGDGQSYQMFTDKTVYEKGAPAAFPVKPEKYSEMKAVGYAVIGDPINGGYIWLNWRESILAYPFNSNTAKITNHGAPTRWYYNGNIAPDGYDVFTVGIGINGDPGTDEATATSFMQSISSKPENYTNVTDTTKILEQLNRYFHTIVTEKKSIENGTITDPMGELIDLQLGTDGRFDPADYTLTANDGSRLENGQAVGGPQNDGGLLKNAKVFYDTTEKRIRVTGLYLGTGEKVTLTYNVRLNDQFVSNKFYDTNGRTTLHPKEVEKNTVRDFPIPKIRDVRKYPAITIAKEKKLGEIEFIKINKNDKKPLRDAVFSLQKQHPDYPDIYGAIDQNGTYQNVRTGEDGKLTFKNLSDGKYRLFENSEPAGYKPVQNKPIVAFQIVNGEVRDVTSIVPQDIPAGYEFTNDKHYITNEPIPPKREYPRTGGIGMLPFYLIGCMMMGGVLLYTRKHP

SEQ ID NO: 224 - protein, 665 aa, Streptococcus pneumoniae; identical to SEQ ID NO: 210

SEQ ID NO: 225 - protein, 401 aa, Streptococcus pneumoniae
MTMQKMQKMISRIFFVMALCFSLVWGAHAVQAQEDHTLVLQLENYQEVVSQLPSRDGHRLQVWKLDDSYSYDNRVQIVRDLHSWDENKLSSFKKTSFEMTFLENQIEVSHIPNGLYYVRSIIQTDAVSYPAEFLFEMTDQTVEPLVIVAKKADTVTTKVKLIKVDQDHNRLEGVGFKLVSVARDGSEKEVPLIGEYRYSSSGQVGRTLYTDKNGEIVVTNLPLGTYRFKEVEPLAGYTVTTMDTDVQLVDHQLVTITVVNQKLPRGNVDFMKVDGRTNTSLQGAMFKVMKEENGHYTPVLQNGKEVVVASGKDGRFRVEGLEYGTYYLWELQAPTGYVQLTSPVSFTIGKDTRKELVTVVKNNKRPRIDVPDTGEETLYILMLVAILLFGSGYYLTKKTNN

SEQ ID NO: 226 - protein, 302 aa, Streptococcus pneumoniae
MLIKMAKTKKQKRNNLLLGVVFFIGMAVMAYPLVSRLYYRVESNQQIADFDKEKATLDEADIDERMKLAQAFNDSLNNVVSGDPWSEEMKKKGRAEYARMLEIHERMGHVEIPAIDVDLPVYAGTAEEVLQQGAGHLEGTSLPIGGNSTHAVITAHTGLPTAKMFTDLTKLKVGDKFYVHNIKEVMAYQVDQVKVIEPTNFDDLLIVPGHDYVTLLTCTPYMINTHRLLVRGHRIPYVAEVEEEFIAANKLSHLYRYLFYVAVGLIVILLWIIRRLRKKKRQSERALKALKEATKEVKVEDE

SEQ ID NO: 227 - protein, 297 aa, Streptococcus pneumoniae
MSKSRYSRKKSVKKKKNPFILLLIFLVGLAVAMYPLVSRYYYRIESNEVIKEFDETVSQMDKAELEERWRLAQAFNATLKPSEILDPFTDQEKKQGVSEYANMLKVHERIGYVEIPAIEQEIPMYVGTSEDILQKGAGLLEGASLPVGGENTHTVITAHRGLPTAELFSQLDKMKKGDIFYLHVLDQVLAYQVDQIVTVEPNDFEPVLIQHGQDYATLLTCTPYMINSHRLLVRGKRIPYTAPIAERNRAVRERGQFWLWLLLGAMAVILLLLYRVYRNRRIVKGLEKQLEGRHVKD

SEQ ID NO: 228 - protein, 283 aa, Streptococcus pneumoniae; identical to SEQ ID NO: 80

SEQ ID NO: 229 - protein, 509 aa, Streptococcus pneumoniae; identical to SEQ ID NO: 87

SEQ ID NO: 230 - protein, 886 aa, Streptococcus pneumoniae
MKKVRKIFQKAVAGLCCISQLTAFSSIVALAETPETSPAIGKVVIKETGEGGALLGDAVFELKNNTDGTTVSQRTEAQTGEAIFSNIKPGTYTLTEAQPPVGYKPSTKQWTVEVEKNGRTTVQGEQVENREEALSDQYPQTGTYPDVQTPYQIIKVDGSEKNGQHKALNPNPYERVIPEGTLSKRIYQVNNLDDNQYGIELTVSGKTVYEQKDKSVPLDVVILLDNSNSMSNIRNKNARRAERAGEATRSLIDKITSDPENRVALVTYASTIFDGTEFTVEKGVADKNGKRLNDSLFWNYDQTSFTTNTKDYSYLKLTNDKNDIVELKNKVPTEAEDHDGNRLMYQFGATFTQKALMKADEILTQQARQNSQKVIFHITDGVPTMSYPINFNHATFAPSYQNQLNAFFSKSPNKDGILLSDFITQATSGEHTIVRGDGQSYQMFTDKTVYEKGAPAAFPVKPEKYSEMKAAGYAVIGDPINGGYIWLNWRESILAYPFNSNTAKITNHGDPTRWYYNGNIAPDGYDVFTVGIGINGDPGTDEATATSFMQSISSKPENYTNVTDTTKILEQLNRYFHTIVTEKKSIENGTITDPMGELIDLQLGTDGRFDPADYTLTANDGSRLENGQAVGGPQNDGGLLKNAKVLYDTTEKRIRVTGLYLGTDEKVTLTYNVRLNDEFVSNKFYDTNGRTTLHPKEVEQNTVRDFPIPKIRDVRKYPEITISKEKKLGDIEFIKVNKNDKKPLRDAVFSLQKQHPDYPDIYGAIDQNGTYQNVRTGEDGKLTFKNLSDGKYRLFENSEPAGYKPVQNKPIVAFQIVNGEVRDVTSIVPQDIPAGYEFTNDKHYITNEPIPPKREYPRTGGIGMLPFYLIGCMMMGGVLLYTRKHP

SEQ ID NO: 231 - protein, 654 aa, Streptococcus pneumoniae
MKSINKFLTILAALLLTVSSLFSAATVFAAEQKTKTLTVHKLLMTDQELDAWNSDAITTAGYDGSQNFEQFKQLQGVPQGVTEISGVAFELQSYTGPQGKEQENLTNDAVWTAVNKGVTTETGVKFDTEVLQGTYRLVEVRKESTYVGPNGKVLTGMKAVPALITLPLVNQNGVVENAHVYPKNSEDKPTATKTFDTAAGFVDPGEKGLAIGTKVPYIVTTTIPKNSTLATAFWSDEMTEGLDYNGDVVVNYNGQPLDNSHYTLEAGHNGFILKLNEKGLEAINGKDAEATITLKYTATLNALAVADVPEANDVTFHYGNNPGHGNTPKPNKPKNGELTITKTWADAKDAPIAGVEVTFDLVNAQTGEVVKVPGHETGIVLNQTNNWTFTATGLDNNTEYKFVERTIKGYSADYQTITETGKIAVKNWKDENPEPINPEEPRVKTYGKKFVKVDQKDERLKEAQFVVKNEQGKYLALKSAAQQAVNEKAAAEAKQALDAAIAAYTNAADKNAAQAVVDAAQKTYNDNYRAARFGYVEVERKEDALVLTSNTDGQFQISGLAAGSYTLEETKAPEGFAKLGDVKFEVGAGSWNQGDFNYLKDVQKNDATKVVNKKITIPQTGGIGTIIFAVAGAVIMGIAVYAYVKNNKDEDQLA

SEQ ID NO: 232 - protein, 401 aa, Streptococcus pneumoniae; identical to SEQ ID NO: 225

SEQ ID NO: 233 - protein, 304 aa, Streptococcus pneumoniae
MLIKMVKTKKQKRNNLLLGVVFFIGMAVMAYPLVSRLYYRVESNQQIADFDKEKATLDEADIDERMKLAQAFNDSLNNVVSGDPWSEEMKKKGRAEYARMLEIHERMGHVEIPVIDVDLPVYAGTAEEVLQQGAGQLEGTSLPIGGNSTHAVITAHTGLPTAKMFTDLTKLKVGDKFYVHNIKEVMAYQVDQVKVIEPTNFDDLLIVPGHDYVTLLTCTPYMINTHRLLVRGHRIPYVAEVEEEFIAANKLSHLYRYLFYVAVGLIVILLWIIRRLRKKKKQPEKALKALKAARKEVKVEDGQQ

SEQ ID NO: 234 - protein, 297 aa, Streptococcus pneumoniae
MDNSRRSRKKGTKKKKHPLILLLIFLVGFAVAIYPLVSRYYYRIESNEVIKEFDETVSQMDKAELEERWRLAQAFNATLKPSEILDPFTEQEKKKGVSEYANMLKVHERIGYVEIPAIDQEIPMYVGTSEEILQKGAGLLEGASLPVGGENTHTVVTAHRGLPTAELFSQLDKMKKGDVFYLHVLDQVLAYQVDQILTVEPNDFEPVLIQHGKDYATLLTCTPYMINSHRLLVRGKRIPYTAPIAERNRAVRERGQFWLWLLLAALVMILVLSYGVYRHRRIVKGLEKQLEEHHVKG

SEQ ID NO: 235 - protein, 283 aa, Streptococcus pneumoniae; identical to SEQ ID NO: 178

SEQ ID NO: 236 - protein, 509 aa, Streptococcus pneumoniae; identical to SEQ ID NO: 87

SEQ ID NO: 237 - protein, 883 aa, Streptococcus pneumoniae; identical to SEQ ID NO: 188

SEQ ID NO: 238 - protein, 644 aa, Streptococcus pneumoniae
MKSINKFLTMLAALLLTASSLFSAATVFAADNVSTAPDAVTKTLTIHKLLLSEDDLKTWDTNGPKGYDGTQSSLKDLTGVVAEEIPNVYFELQKYNLTDGKEKENLKDDSKWTTVHGGLTTKDGLKIETSTLKGVYRIREDRTKTTYVGPNGQVLTGSKAVPALVTLPLVNNNGTVIDAHVFPKNSYNKPVVDKRIADTLNYNDQNGLSIGTKIPYVVNTTIPSNATFATSFWSDEMTEGLTYNEDVTITLNNVAMDQADYEVTKGINGFNLKLTEAGLAKINGKDADQKIQITYSATLNSLAVADIPESNDITYHYGNHQDHGNTPKPTKPNNGQITVTKTWDSQPAPEGVKATVQLVNAKTGEKVGAPVELSENNWTYTWSGLDNSIEYKVEEEYNGYSAEYTVESKGKLGVKNWKDNNPAPINLEEPRVKTYGKKFVKVDQKDTRLENAQFVVKKADSNKYIAFKSTAQQAADEKAAATAKQKLDAAVAAYTNAADKQAAQALVDQAQQEYNVAYKEAKFGYVEVAGKDEAMVLTSNTDGQFQISGLAAGTYKLEEIKAPEGFAKIDDVEFVVGAGSWNQGEFNYLKDVQKNDATKVVNKKITIPQTGGIGTIIFAVAGAVIMGIAVYAYVKNNKDEDQLA

SEQ ID NO: 239 - protein, 401 aa, Streptococcus pneumoniae
MTMQKMQKMISRIFFVMALCFSLVWGAHAVQAQEDHTLVLQLENYQEVVSQLPSRDGHRLQVWKLDDSYSYDNRVQIVRDLHSWDENKLSSFKKTSFEMTFLENQIEVSHIPNGLYYVRSIIQTDAVSYPAEFLFEMTDQTVEPLVIVAKKADTVTTKVKLIKVDQDHNRLEGVGFKLVSVARDGSEKEVPLIGEYRYSSSGQVGRTLYTDKNGEIVVTNLPLGTYRFKEVEPLAGYAVTTMDTDVQLVDHQLVTITVVNQKLPRGNVDFMKVDGRTNTSLQGAMFKVMKEENGHYTPVLQNGKEVVVASGKDGRFRVEGLEYGTYYLWELQAPTGYVQLTSPVSFTIGKDTRKELVTVVKNNKRPRIDVPDTGEETLYILMLVAILLFGSGYYLTKKTNN

SEQ ID NO: 240 - protein, 302 aa, Streptococcus pneumoniae; identical to SEQ ID NO: 212

SEQ ID NO: 241 - protein, 297 aa, Streptococcus pneumoniae; identical to SEQ ID NO: 213

SEQ ID NO: 242 - protein, 133 aa, Streptococcus pneumoniae
VFFRHLDQLKVGDALYYDNGQEIVEYQMMDTEIILPSEWEKLESVSSKNIMTLITCDPIPTFNKRLLVNFERVAVYQKSDPQTAAVARVAFTKEGQSVSRVATSQWLYRGLVVLAFLGILFVLWKLARLLRGK

SEQ ID NO: 243 - protein, 511 aa, Streptococcus agalactiae
MPYVKKKKDSFLVETYLEQSIRDKSELVLLLFKSPTIIFSHVAKQTGLTAVQLKYYCKELDDFFGNNLDITIKKGKIICCFVKPVKEFYLHQLYDTSTILKLLVFFIKNGTSSQPLIKFSKKYFLSSSSAYRLRESLIKLLREFGLRVSKNTIVGEEYRIRYLIAMLYSKFGIVIYPLDHLDNQIIYRFLSQSATNLRTSPWLEEPFSFYNMLLALSWKRHQFAVSIPQTRIFRQLKKLFIYDCLTRSSRQVIENAFSLTFSQGDLDYLFLIYITTNNSFASLQWTPQHIETCCHIFEKNDTFRLLLEPILKRLPQLNHSKQDLIKALMYFSKSFLFNLQHFVIEIPSFSLPTYTGNSNLYKALKNIVNQWLAQLPGKRHLNEKHLQLFCSHIEQILKNKQPALTVVLISSNFINAKLLTDTIPRYFSDKGIHFYSFYLLRDDIYQIPSLKPDLVITHSRLIPFVKNDLVKGVTVAEFSFDNPDYSIASIQNLIYQLKDKKYQDFLNEQLQ

SEQ ID NO: 244 - protein, 744 aa, Streptococcus agalactiae
MQKRDKTNYGSANNKRRQTTIGLLKVFLTFVALIGIVGFSIRAFGAEEQSVPNRQSSIQDYPWYGYDSYPKGYPDYSPLKTYHNLKVNLEGSKDYQAYCFNLTKHFPSKSDSVRSQWYKKLEGTNENFIKLADKPRIEDGQLQQNILRILYNGYPNNRNGIMKGIDPLNAILVTQNAIWYYTDSAQINPDESFKTEARSNGINDQQLGLMRKALKELIDPNLGSKYSNKTPSGYRLNVFESHDKTFQNLLSAEYVPDTPPKPGEEPPAKTEKTSVIIRKYAEGDYSKLLEGATLKLSQIEGSGFQEKDFQSNSLGETVELPNGTYTLTETSSPDGYKIAEPIKFRVENKKVFIVQKDGSQVENPNKEVAEPYSVEAYNDFMDEEVLSGFTPYGKFYYAKNKDKSSQVVYCFNADLHSPPDSYDSGETINPDTSTMKEVKYTHTAGSDLFKYALRPRDTNPEDFLKHIKKVIEKGYKKKGDSYNGLTETQFRAATQLAIYYFTDSADLKTLKTYNNGKGYHGFESMDEKTLAVTKELITYAQNGSAPQLTNLDFFVPNNSKYQSLIGTEYHPDDLVDVIRMEDKKQEVIPVTHSLTVKKTVVGELGDKTKGFQFELELKDKTGQPIVNTLKTNNQDLVAKDGKYSFNLKHGDTIRIEGLPTGYSYTLKETEAKDYIVTVDNKVSQEAQSVGKDITEDKKVTFENRKDLVPPTGLTTDGAIYLWLLLLVPLGLLVWLFGRKGLKND

SEQ ID NO: 245 - protein, 173 aa, Streptococcus agalactiae
MTNYLNRLNENSLFKAFIRLVLKISIIGFLGYILFQYVFGVMIINTNDMSPALSAGDGVLYYRLADRSHINDVVVYEVDNTLKVGRIAAQAGDEVNFTQEGGLLINGHPPEKEVPYLTYPHSSGPNFPYKVPTGTYFILNDYREERLDSRYYGALPINQIKGKISTLLRVRGI

SEQ ID NO: 246 - protein, 344 aa, Streptococcus agalactiae
MKKNKLLLATAILATALGMASMSQNIKAETAGVIDGSTLVVKKTFPSYTDDNVLMPKADYSFKVEADDNAKGKTKDGLDIKPGVIDGLENTKTIRYSNSDKITAKEKSVNFEFANVKFPGVGVYRYTVAEVNGNKAGITYDSQQWTVDVYVVNKEGGGFEVKYIVSTEVGQSEKKPVLFKNSFDTTSLKIEKQVTGNTGEHQRLFSFTLLLTPNECFEKGQVVNILQGGETKKVVIGEEYSFTLKDKESVTLSQLPVGIEYKLTEEDVTKDGYKTSATLKDGEQSSTYELGKDHKTDKSADEIVVTNKRDTQVPTGVVGTLAPFAVLSIVAIGGVIYITKRKKA

SEQ ID NO: 247 - protein, 241 aa, Streptococcus agalactiae
MMMTIVQVINKAIDTLILIFCLVVLFLAGFGLWDSYHLYQQADASNFKKFKTAQQQPKFEDLLALNEDVIGWLNIPGTHIDYPLVQGKTNLEYINKAVDGSVAMSGSLFLDTRNHNDFTDDYSLIYGHHMAGNAMFGEIPKFLKKNFFNKHNKAIIETKERKKLTVTIFACLKTDAFDQLVFNPNAITNQDQQRQLVDYISKRSKQFKPVKLKHHTKFVAFSTCENFSTDNRVIVVGTIQE

SEQ ID NO: 248 - protein, 189 aa, Streptococcus agalactiae
MLFSVVMMLTMLAFNQTVLAKDSTVQTSISVENVLERAGDSTPFSIALESIDAMKTIEEITIAGSGKASFSPLTFTTVGQYTYRVYQKPSQNKDYQADTTVFDVLVYVTYDEDGTLVAKVISRRAGDEEKSAITFKPKRLVKPIPPRQPDIPKTPLPLAGEVKSLLGILSIVLLGLLVLLYVKKLKSRL

SEQ ID NO: 249 - protein, 401 aa, Streptococcus agalactiae; identical to SEQ ID NO: 119

SEQ ID NO: 250 - protein, 1160 aa, Streptococcus agalactiae
MTQKNSYKLSFLLSLTGFILGLLLVFIGLSGVSVGHAETRNGANKQGYFEIKKVDQNNKPLSGATFSLTPKDGKGKPVQTFTSSEEGIIDAQNLQPGTYTLKEETAPDGYDKTSRTWTVTVYENGYTKLVENPYNGEIISKAGSKDVSSSLQLENPKMSVVSKYGEQEKTSNSADFYRNHAAYFKMSFELKQKDKSETINPGDTFVLQLDRRLNPKGISQDIPKIIYDSENSPLAIGKYDAKTHQLTYTFTNYIAGLDKVQLSAELSLFLENKEVLENTNISDFKSTIGGQEITYKGTVNVLYGNESTKESNYITNGLSNVGGSIESYNTETGEFVWYVYVNPNRTNIPYAVLNLWGFAKRTAQGENDNSSVSSAQLTGYDIYEVPHNYRLPTSYGVDISRLNLRKDLEAKLPQGSTQGANKRLRIDFGENLQGKAFVVKVTGKADQSGKELIVQSHLSSFNNWGSYKTLRPNSHVSFTNEIALSPSKGSGSGTSEFTKPAITVANLKRVAQLRFKKVSTDNVPLPEAAFELRSSNGNSQKLEASSNTQGEIHFKDLTSGTYDLYETKAPKGYQQVTEKLATVTVDTTKPAEQMVKWEKPHSFVKVEANKEVTIVNHKETLTFSGKKIWENDRPDQRPAKIQVQLLQNGQKMPNQIQEVTKDNDWSYHFKDLPKYDAKNQEYKYSVEEVKVPDGYKVSYLGNDIFNTRETEFVFEQNNFNLEFGNAEIKGQSGSKIIDEDTLTSFKGKKIWKNDTAENRPQAIQVQLYADGVAVEGQTKFISGSGNEWSFEFKNLKKYNGTGNDIIYSVKEVTVPTGYDVTYSANDIINTKREVITQQGPNLEIEETLPLESGASGGTTTVEDSRSVDTLSGLSSEQGQSGDMTIEEDSATHIKFSKRDIDGKELAGATMELRDSSGKTISTWISDGQVKDFYLMPGKYTFVETAAPDGYEIATAITFTVNEQGQVTVNGKATKGDAHIVMVDAYKPTKGSGQVIDIEEKLPDEQGHSGSTTEIEDSKPSDVIIGGQGEVVDTTEDTQSGMTGHSGSTTEIEDSKSSDVIIGGQGQVVETTEDTQTGMHGDSGCKTEVEDTKLVQFFHFDNKEPESNSEIPKKDKPKSNTSLPATGEKQHNKFFWMVTSCSLISSVFVISLKSKKRLLSC

SEQ ID NO: 251 - DNA, 1650 bp, Streptococcus agalactiae
atgagagagaaaatattaatagcagcaaaaaaactaatgctagcttgtttagctatcttagctgtagtagggcttggaatgacaagagtatcagctttatcaaaagatgataaggcggagttgaagataacaaatatcgaaggtaaaccgaccgtgacactgtataaaattggtgatggaaaatacagtgagcgaggggattcttttattggatttgagttaaagcaaggtgtggagctaaataaggcaaaacctacatctcaagaaataaataaaatcgctaatggtattaataaaggtagtgttaaggctgaagtagttaatataaaagaacatgctagtacaacttatagttatacaacaactggtgcaggtatttacttggctatattgactggagctactgatggacgtgcctataatcctatcttactgacagcttcttacaatgaggaaaatccacttaagggagggcagattgacgcaactagtcattatctttttggagaagaagcagttgctaaatctagccaaccaacaattagcaagtcaattacaaaatccacaaaagatggtgataaagatacagcatctgtaggtgaaaaagttgattacaaattaactgttcagttaccaagttattcgaaagatgctatcaataaaacggtgtttatcactgacaaattgtctcagggacttactttccttccaaaaagtttaaagattatctggaatggtcaaacgttaacaaaggtgaatgaagaatttaaagctggagataaggtaattgctcaacttaaggttgaaaataatggatttaatctgaactttaattatgataaccttgataatcatgccccagaagttaactatagtgctctactaaatgaaaacgcagttgttggtaaaggtggtaatgacaataatgtagactattactattcaaataatccgaataaaggagagacccataaaacaactgagaagcctaaagagggtgaaggtactggtatcactaaaaagacggataaaaaaaccgtctacacctatcgtgtagcctttaagaaaacaggcaaagatcatgccccactagctggtgctgttttcggtatctattcagataaggaagcgaaacaattagtcgatattgttgtgacaaatgcacagggttatgcagcatcaagcgaagttgggaaagggacttattacattaaagaaattaaatcccctaagggttactctttaaatacaaatatttatgaagtggaaacttcatgggaaaaagctacaacgacttctacaactaatcgtttagagacaatttatacaacagatgataatcaaaagtctccaggaactaatacagttggttggttggaagatggtgtcttttacaaagaaaatccaggtggtgatgctaaacttgcctatatcaaacaatcaacagaggagacttctacaactatagaagtcaaagaaaatcaagctgaaggttcaggtacggtattattagaaactgaaattcctaacaccaaattaggtgaattaccttcgacaggtagcattggtacttacctctttaaagctattggttcggctgctatgatcggtgcaattggtatttatattgttaaacgtcgtaaagcttaa

SEQ ID NO: 252 - protein, 549 aa, Streptococcus agalactiae
MREKILIAAKKLMLACLAILAVVGLGMTRVSALSKDDKAELKITNIEGKPTVTLYKIGDGKYSERGDSFIGFELKQGVELNKAKPTSQEINKIANGINKGSVKAEVVNIKEHASTTYSYTTTGAGIYLAILTGATDGRAYNPILLTASYNEENPLKGGQIDATSHYLFGEEAVAKSSQPTISKSITKSTKDGDKDTASVGEKVDYKLTVQLPSYSKDAINKTVFITDKLSQGLTFLPKSLKIIWNGQTLTKVNEEFKAGDKVIAQLKVENNGFNLNFNYDNLDNHAPEVNYSALLNENAVVGKGGNDNNVDYYYSNNPNKGETHKTTEKPKEGEGTGITKKTDKKTVYTYRVAFKKTGKDHAPLAGAVFGIYSDKEAKQLVDIVVTNAQGYAASSEVGKGTYYIKEIKSPKGYSLNTNIYEVETSWEKATTTSTTNRLETIYTTDDNQKSPGTNTVGWLEDGVFYKENPGGDAKLAYIKQSTEETSTTIEVKENQAEGSGTVLLETEIPNTKLGELPSTGSIGTYLFKAIGSAAMIGAIGIYIVKRRKA

SEQ ID NO: 253 - DNA, 1059 bp, Streptococcus agalactiae
ttggagagagaaaaaatgaaaaaaaacaaattattacttgctactgcaatcttagcaactgctttaggaacagcttctttaaatcaaaacgtaaaagctgagacggcaggggttgtaacaggaaaatcactacaagttacaaagacaatgacttatgatgatgaagaggtgttaatgcccgaaaccgcctttacttttactatagagcctgatatgactgcaagtggaaaagaaggcagcctagatattaaaaatggaattgtagaaggcttagacaaacaagtaacagtaaaatataagaatacagataaaacatctcaaaaaactaaaatagcacaatttgatttttctaaggttaaatttccagctataggtgtttaccgctatatggtttcagagaaaaacgataaaaaagacggaattacgtacgatgataaaaagtggactgtagatgtttatgttgggaataaggccaataacgaagaaggtttcgaagttctatatattgtatcaaaagaaggtacttctagtactaaaaaaccaattgaatttacaaactctattaaaactacttccttaaaaattgaaaaacaaataactggcaatgcaggagatcgtaaaaaatcattcaacttcacattaacattacaaccaagtgaatattataaaactggatcagttgtgaaaatcgaacaggatggaagtaaaaaagatgtgacgataggaacgccttacaaatttactttgggacacggtaagagtgtcatgttatcgaaattaccaattggtatcaattactatcttagtgaagacgaagcgaataaagacggctacactacaacggcaacattaaaagaacaaggcaaagaaaagagttccgatttcactttgagtactcaaaaccagaaaacagacgaatctgctgacgaaatcgttgtcacaaataagcgtgacactcaagttccaactggtgttgtagggacccttgctccatttgcagttcttagcattgtggctattggtggagttatctatattacaaaacgtaaaaaagcttaa

SEQ ID NO: 254 - protein, 352 aa, Streptococcus agalactiae; identical to SEQ ID NO: 95

SEQ ID NO: 255 - DNA, 1029 bp, Streptococcus agalactiae
  misc_feature (918)..(918): n is a, c, g, or t
  misc_feature (921)..(921): n is a, c, g, or t
  misc_feature (929)..(929): n is a, c, g, or t
  misc_feature (939)..(939): n is a, c, g, or t
  misc_feature (945)..(945): n is a, c, g, or t
  misc_feature (957)..(957): n is a, c, g, or t
  misc_feature (967)..(967): n is a, c, g, or t
  misc_feature (977)..(977): n is a, c, g, or t
  misc_feature (983)..(983): n is a, c, g, or t
  misc_feature (989)..(989): n is a, c, g, or t
  misc_feature (996)..(996): n is a, c, g, or t
  misc_feature (999)..(999): n is a, c, g, or t
  misc_feature (1002)..(1002): n is a, c, g, or t
  misc_feature (1006)..(1006): n is a, c, g, or t
  misc_feature (1017)..(1017): n is a, c, g, or t
  misc_feature (1025)..(1025): n is a, c, g, or t
atgaaaaaaaataaattattacttgctactgcaatcttagcaactgctttaggaacagcttctttaaatcaaaacgtaaaagctgagacggcaggggttgttagcagtggtcaattaacaataaaaaaatcaattacaaattttaatgatgatacacttttgatgcctaagacagactatacttttagcgttaatccggatagtgcggctacaggtactgaaagtaatttaccaattaaaccaggtattgctgttaacaatcaagatattaaggtttcttattctaatactgataagacatcaggtaaagaaaaacaagttgttgttgactttatgaaagttacttttcctagcgttggtatttaccgttatgttgttaccgagaataaagggacagcagaaggagttacatatgatgatacaaaatggttagttgacgtctatgttggtaataatgaaaagggaggtcttgaaccaaagtatattgtatctaaaaaaggagattctgctactaaagaaccaatccagtttaataattcattcgaaacaacgtcattaaaaattgaaaagaaagttactggtaatacaggagatcataaaaaagcatttaactttacattaacattgcaaccaaatgaatactatgaggcaagttcggttgtgaaaattgaagagaacggacaaacgaaagatgtgaaaattggggaggcatataagtttactttgaacgatagtcagagtgtgatattgtctaaattaccagttggtattaattataaagttgaagaagcagaagctaatcaaggtggatatactacaacagcaactttaaaagatggagaaaagttatctacttataacttaggtcaggaacataaaacagacaagactgctgatgaaatcgttgtcacaaataancgngacactcnagttccaacnggtgtngtaggcaccccncctccattcncagttcttancattgnggctantggtggngtnatntatnttacaaaacgnaaaaaagnataa

SEQ ID NO: 256 - protein, 342 aa, Streptococcus agalactiae
  misc_feature (1)..(342): X = any amino acid residue
MKKNKLLLATAILATALGTASLNQNVKAETAGVVSSGQLTIKKSITNFNDDTLLMPKTDYTFSVNPDSAATGTESNLPIKPGIAVNNQDIKVSYSNTDKTSGKEKQVVVDFMKVTFPSVGIYRYVVTENKGTAEGVTYDDTKWLVDVYVGNNEKGGLEPKYIVSKKGDSATKEPIQFNNSFETTSLKIEKKVTGNTGDHKKAFNFTLTLQPNEYYEASSVVKIEENGQTKDVKIGEAYKFTLNDSQSVILSKLPVGINYKVEEAEANQGGYTTTATLKDGEKLSTYNLGQEHKTDKTADEIVVTNXRDTXVPTGVVGTPPPFXVLXIXAXGGVXYXTKRKKX

SEQ ID NO: 257 - DNA, 803 bp, Streptococcus agalactiae
agcagtggtcaattaacaataaaaaaatcaattacaaattttaatgatgatacacttttgatgcctaagacagactatacttttagcgttaatccggatagtgcggctacaggtactgaaagtaatttaccaattaaaccaggtattgctgttaacaatcaagatattaaggtttcttattctaatactgataagacatcaggtaaagaaaaacaagttgttgttgactttatgaaagttacttttcctagcgttggtatttaccgttatgttgttaccgagaataaagggacagcagaaggagttacatatgatgatacaaaatggttagttgacgtctatgttggtaataatgaaaagggaggtcttgaaccaaagtatattgtatctaaaaaaggagattctgctactaaagaaccaatccagtttaataattcattcgaaacaacgtcattaaaaattgaaaaggaagttactggtaatacaggagatcataaaaaagcatttaactttacattaacattgcaaccaaatgaatactatgaggcaagttcggttgtgaaaattgaagagaacggacaaacgaaagatgtgaaaattggggaggcatataagtttactttgaacgatagtcagagtgtgatattgtctaaattaccagttggtattaattataaagttgaagaagcagaagctaatcaaggtggatatactacaacagcaactttaaaagatggagaaaagttatctacttataacttaggtcaggaacataaaacagacaagactgctgatgaaatcgt

SEQ ID NO: 258 - protein, 268 aa, Streptococcus agalactiae
SSGQLTIKKSITNFNDDTLLMPKTDYTFSVNPDSAATGTESNLPIKPGIAVNNQDIKVSYSNTDKTSGKEKQVVVDFMKVTFPSVGIYRYVVTENKGTAEGVTYDDTKWLVDVYVGNNEKGGLEPKYIVSKKGDSATKEPIQFNNSFETTSLKIEKEVTGNTGDHKKAFNFTLTLQPNEYYEASSVVKIEENGQTKDVKIGEAYKFTLNDSQSVILSKLPVGINYKVEEAEANQGGYTTTATLKDGEKLSTYNLGQEHKTDKTADEIV

SEQ ID NO: 259 - DNA, 803 bp, Streptococcus agalactiae; identical to SEQ ID NO: 257

SEQ ID NO: 260 - protein, 268 aa, Streptococcus agalactiae; identical to SEQ ID NO: 258

SEQ ID NO: 261 - DNA, 843 bp, Streptococcus agalactiae
gagacggcaggggttgttagcagtggtcaattaacaataaaaaaatcaattacaaattttaatgatgatacacttttgatgcctaagacagactatacttttagcgttaatccggatagtgcggctacaggtactgaaagtaatttaccaattaaaccaggtattgctgttaacaatcaagatattaaggtttcttattctaatactgataagacatcaggtaaagaaaaacaagttgttgttgactttatgaaagttacttttcctagcgttggtatttaccgttatgttgttaccgagaataaagggacagcagaaggagttacatatgatgatacaaaatggttagttgacgtctatgttggtaataatgaaaagggaggtcttgaaccaaagtatattgtatctaaaaaaggagattctgctactaaagaaccaatccagtttaataattcattcgaaacaacgtcattaaaaattgaaaaggaagttactggtaatacaggagatcataaaaaagcatttaactttacattaacattgcaaccaaatgaatactatgaggcaagttcggttgtgaaaattgaagagaacggacaaacgaaagatgtgaaaattggggaggcatataagtttactttgaacgatagtcagagtgtgatattgtctaaattaccagttggtattaattataaagttgaagaagcagaagctaatcaaggtggatatactacaacagcaactttaaaagatggagaaaagttatctacttataacttaggtcaggaacataaaacagacaagactgctgatgaaatcgttgtcacaaataaccgtgacact

SEQ ID NO: 262 - protein, 281 aa, Streptococcus agalactiae
ETAGVVSSGQLTIKKSITNFNDDTLLMPKTDYTFSVNPDSAATGTESNLPIKPGIAVNNQDIKVSYSNTDKTSGKEKQVVVDFMKVTFPSVGIYRYVVTENKGTAEGVTYDDTKWLVDVYVGNNEKGGLEPKYIVSKKGDSATKEPIQFNNSFETTSLKIEKEVTGNTGDHKKAFNFTLTLQPNEYYEASSVVKIEENGQTKDVKIGEAYKFTLNDSQSVILSKLPVGINYKVEEAEANQGGYTTTATLKDGEKLSTYNLGQEHKTDKTADEIVVTNNRDT

SEQ ID NO: 263 - DNA, 900 bp, Streptococcus agalactiae
gagacggcaggagtgtccgaaaatgcaaaattaatagtaaaaaagacatttgactcttatacagacaatgaagttttaatgccaaaagctgattatacttttaaagtagaggcagatagtacagctagtggcaaaacgaaagacggtttagagattaagccaggtattgttaatggtttaacagaacagattatcagctatactaatactgataaaccagatagtaaagttaaaagtacagagtttgatttttcaaaagtagtattccctggtattggtgtttaccgctatactgtttcagaaaaacaaggtgatgttgaaggaattacctacgatactaagaagtggacagtagatgtttatgttggaaacaaagaaggtggtggttttgaacctaagtttattgtatctaaggaacaaggaacagacgtcaaaaaaccagttaattttaacaactcgtttgcaactacttcgttaaaagttaagaagaatgtatcggggaatactggagaattgcaaaaagaatttgactttacattgacgcttaatgaaagcacgaattttaaaaaagatcaaattgtttctttacaaaaaggaaacgagaaatttgaagttaagattggtactccctacaagtttaaactcaaaaatggggaatctattcaactagacaagttaccagttggtattacttataaagtcaatgaaatggaagctaataaagatgggtataaaacaacagcatccttgaaagagggagatggtcaatctaaaatgtatcaattggatatggaacaaaaaacagacgaatctgctgacgaaatcgttgtcacaaataagcgtgacactcaagttccaactggtgttgtaggcacccttgctccatttgcagttcttagc

SEQ ID NO: 264 - protein, 300 aa, Streptococcus agalactiae
ETAGVSENAKLIVKKTFDSYTDNEVLMPKADYTFKVEADSTASGKTKDGLEIKPGIVNGLTEQIISYTNTDKPDSKVKSTEFDFSKVVFPGIGVYRYTVSEKQGDVEGITYDTKKWTVDVYVGNKEGGGFEPKFIVSKEQGTDVKKPVNFNNSFATTSLKVKKNVSGNTGELQKEFDFTLTLNESTNFKKDQIVSLQKGNEKFEVKIGTPYKFKLKNGESIQLDKLPVGITYKVNEMEANKDGYKTTASLKEGDGQSKMYQLDMEQKTDESADEIVVTNKRDTQVPTGVVGTLAPFAVLS

SEQ ID NO: 265 - DNA, 864 bp, Streptococcus agalactiae
gagacggcaggggttgtaacaggaaaatcactacaagttacaaagacaatgacttatgatgatgaagaggtgttaatgcccgaaaccgcctttacttttactatagagcctgatatgactgcaagtggaaaagaaggcgacctagatattaaaaatggaattgtagaaggcttagacaaacaagtaacagtaaaatataagaatacagataaaacatctcaaaaaactaaaatagcacaatttgatttttctaaggttaaatttccagctataggtgtttaccgctatatggtttcagagaaaaacgataaaaaagacggaattaggtacgatgataaaaagtggactgtagatgtttatgttgggaataaggccaataacgaagaaggtttcgaagttctatatattgtatcaaaagaaggtacttctagtactaaaaaaccaattgaatttacaaactctattaaaactacttccttaaaaattgaaaaacaaataactggcaatgcaggagatcgtaaaaaatcattcaacttcacattaacattacaaccaagtgaatattataaaaccggatcagttgtgaaaatcgaacaggatggaagtaaaaaagatgtgacgataggaacgccttacaaatttactttgggacacggtaagagtgtcatgttatcgaaattaccaattggtatcaattactatcttagtgaagacgaagcgaataaagacggttacactacaacggcaacattaaaagaacaaggcaaagaaaagagttccgatttcactttgagtactcaaaaccagaaaacagacgaatctgctgacgaaatcgttgtcacaaataagcgtgacactctcgag

SEQ ID NO: 266 - protein, 288 aa, Streptococcus agalactiae
ETAGVVTGKSLQVTKTMTYDDEEVLMPETAFTFTIEPDMTASGKEGDLDIKNGIVEGLDKQVTVKYKNTDKTSQKTKIAQFDFSKVKFPAIGVYRYMVSEKNDKKDGIRYDDKKWTVDVYVGNKANNEEGFEVLYIVSKEGTSSTKKPIEFTNSIKTTSLKIEKQITGNAGDRKKSFNFTLTLQPSEYYKTGSVVKIEQDGSKKDVTIGTPYKFTLGHGKSVMLSKLPIGINYYLSEDEANKDGYTTTATLKEQGKEKSSDFTLSTQNQKTDESADEIVVTNKRDTLE

SEQ ID NO: 267 - DNA, 1446 bp, Streptococcus agalactiae
aaagatgatactgcacaactaaagataacaaatattgaaggtgggccaacagtaacactttataaaataggagaaggtgtttacaacactaatggtgattcttttattaactttaaatatgctgagggggtttctttaactgaaacaggacctacatcacaagaaattactactattgcaaatggtattaatacgggtaaaataaagccttttagtactgaaaacgttagtatttctaatggaacagcaacttataatgcgagaggtgcatctgtttatattgcattattaacaggtgcgacagatggccgtacctacaatcctattttattagctgcatcttataatggtgagggaaatttagttactaaaaatattgattccaaatctaattatttatatggacaaacaagtgttgcaaaatcatcattaccatctattacaaagaaagtaaccgggacaatagatgacgtgaataaaaagactacctcgttaggaagtgtattgtcttattcgctgacatttgaattaccaagttataccaaagaagcagtcaataaaacagtatatgtttctgataatatgtcggaaggtcttacttttaactttaatagtcttacagtagaatggaaaggtaagatggctaatattactgaagatggttcagtaatggtagaaaatacaaaaatcggaatagctaaggaggttaataacggttttaatttaagttttatttatgatagtttagaatctatatcaccaaatataagttataaagctgttgtaaacaataaagctattgttggtgaagagggtaatcctaataaagctgaattcttctattcaaataatccaacaaaaggtaatacatacgataatttagataagaagcctgataaagggaatggtattacatccaaagaagattctaaaattgtttatacttatcaaatagcgtttagaaaagttgatagtgttagtaagaccccacttattggtgcaatttttggagtttatgatactagtaataaattaattgatattgttacaaccaataaaaatggatatgctatttcaacacaagtatcttcaggaaaatataaaattaaggaattaaaagctcctaaaggttattcattgaatacagaaacttatgaaattacggcaaattgggtaactgctacagtcaagacaagtgctaattcaaaaagtactacttatacatctgataaaaataaggcgacagataattcagagcaagtaggatggttaaaaaatggtatattctattctatagatagtagacctacaggaaatgatgttaaagaggcttatattgaatctactaaggctttaactgatggaacaactttctcaaaatcgaatgaaggttcaggtacagtattattagaaactgacatccctaacaccaagctaggtgaactc

SEQ ID NO: 268 - protein, 482 aa, Streptococcus agalactiae
KDDTAQLKITNIEGGPTVTLYKIGEGVYNTNGDSFINFKYAEGVSLTETGPTSQEITTIANGINTGKIKPFSTENVSISNGTATYNARGASVYIALLTGATDGRTYNPILLAASYNGEGNLVTKNIDSKSNYLYGQTSVAKSSLPSITKKVTGTIDDVNKKTTSLGSVLSYSLTFELPSYTKEAVNKTVYVSDNMSEGLTFNFNSLTVEWKGKMANITEDGSVMVENTKIGIAKEVNNGFNLSFIYDSLESISPNISYKAVVNNKAIVGEEGNPNKAEFFYSNNPTKGNTYDNLDKKPDKGNGITSKEDSKIVYTYQIAFRKVDSVSKTPLIGAIFGVYDTSNKLIDIVTTNKNGYAISTQVSSGKYKIKELKAPKGYSLNTETYEITANWVTATVKTSANSKSTTYTSDKNKATDNSEQVGWLKNGIFYSIDSRPTGNDVKEAYIESTKALTDGTTFSKSNEGSGTVLLETDIPNTKLGEL

SEQ ID NO: 269 - DNA, 799 bp, Streptococcus agalactiae
gaatggaaaggtaagatggctaatattactgaagatggttcagtaatggtagaaaatacaaaaatcggaatagctaaggaggttaataacggttttaatttaagttttatttatgatagtttagaatctatatcaccaaatataagttataaagctgttgtaaacaataaagctattgttggtgaagagggtaatcctaataaagctgaattcttctattcaaataatccaacaaaaggtaatacatacgataatttagataagaagcctgataaagggaatggtattacatccaaagaagattctaaaattgtttatacttatcaaatagcgtttagaaaagttgatagtgttagtaagaccccacttattggtgcaatttttggagtttatgatactagtaataaattaattgatattgttacaaccaataaaaatggatatgctatttcaacacaagtatcttcaggaaaatataaaattaaggaattaaaagctcctaaaggttattcattgaatacagaaacttatgaaattacggcaaattgggtaactgctacagtcaagacaagtgctaattcaaaaagtactacttatacatctgataaaaataaggcgacagataattcagagcaagtaggatggttaaaaaatggtatattctattctatagatagtagacctacaggaaatgatgttaaagaggcttatattgaatctactaaggctttaactgatggaacaactttctcaaaatcgaatgaaggttcaggtacagtattattagaaactgacatcc

SEQ ID NO: 270 - protein, 266 aa, Streptococcus agalactiae
EWKGKMANITEDGSVMVENTKIGIAKEVNNGFNLSFIYDSLESISPNISYKAVVNNKAIVGEEGNPNKAEFFYSNNPTKGNTYDNLDKKPDKGNGITSKEDSKIVYTYQIAFRKVDSVSKTPLIGAIFGVYDTSNKLIDIVTTNKNGYAISTQVSSGKYKIKELKAPKGYSLNTETYEITANWVTATVKTSANSKSTTYTSDKNKATDNSEQVGWLKNGIFYSIDSRPTGNDVKEAYIESTKALTDGTTFSKSNEGSGTVLLETDI

SEQ ID NO: 271 - DNA, 643 bp, Streptococcus agalactiae
  misc_feature (165)..(165): n is a, c, g, or t
  misc_feature (250)..(250): n is a, c, g, or t
  misc_feature (360)..(360): n is a, c, g, or t
  misc_feature (369)..(369): n is a, c, g, or t
  misc_feature (498)..(498): n is a, c, g, or t
  misc_feature (549)..(549): n is a, c, g, or t
  misc_feature (559)..(559): n is a, c, g, or t
gtaacagtaaaatataagaatacagataaaacatctcaaaaaactaaaatagcacaatttgatttttctaaggttaaatttccagctataggtgtttaccgctatatggtttcagagaaaaacgataaaaaagacggaattacgtacgatgataaaaagtggacngtagatgtttatgttgggaataaggccaataacgaagaaggtttcgaagttctatatattgtatcaaaagaaggtacttctagtnctaaaaaaccaattgaatttacaaactctattaaaactacttccttaaaaattgaaaaacaaataactggcaatgcaggagatcgtaaaaaatcattcaacttcacattnacattacanccaagtgaatattataaaactggatcagttgtgaaaatcgaacaggatggaagtaaaaaagatgtgacgataggaacgccttacaaatttactttgggacacggtaagagtgtcatgttatcgaaattnccaattggtatcaattactatcttagtgaagacgaagcgaataaagacggntacactacancggcaacattaaaagaacaaggcaaagaaaagagttccgatttcactttgagtactcaaaaccagaaaacagacgaatctgctg

SEQ ID NO: 272 - protein, 214 aa, Streptococcus agalactiae
  misc_feature (84)..(84): Xaa can be any naturally occurring amino acid
  misc_feature (120)..(120): Xaa can be any naturally occurring amino acid
  misc_feature (123)..(123): Xaa can be any naturally occurring amino acid
  misc_feature (166)..(166): Xaa can be any naturally occurring amino acid
  misc_feature (187)..(187): Xaa can be any naturally occurring amino acid
VTVKYKNTDKTSQKTKIAQFDFSKVKFPAIGVYRYMVSEKNDKKDGITYDDKKWTVDVYVGNKANNEEGFEVLYIVSKEGTSSXKKPIEFTNSIKTTSLKIEKQITGNAGDRKKSFNFTXTLXPSEYYKTGSVVKIEQDGSKKDVTIGTPYKFTLGHGKSVMLSKXPIGINYYLSEDEANKDGYTTXATLKEQGKEKSSDFTLSTQNQKTDESA

SEQ ID NO: 273 - DNA, 380 bp, Streptococcus agalactiae
ttgatagaccgccttcattatcatttctagaatttttctttaggtttgtaaagactacaaaataaaatgatgaaaacaactatcttgtggatacactaaaaagacacgctaattagcaaactctctcttcatcatctctcaccattattatactactatttatatgacaaataaaggtgattttgttaaaatataactttgaaaatccacatatatttttaatcttccgtctgaaaaaataaataaaaatagtaaaaataaacacgaatttaaaataagcaaattttttaagaaaatctgtgctaaactttaatagttttgtgcttaataataatcagcacttacaaagaacaaagggaaaagcgaggagagaactttta
